(19) United States
(12) Patent Application Publication
(10) Pub. No.: US 2023/0243002 A1
(43) Pub. Date: Aug. 3, 2023

(54) ASSAY OT DETECT VIRUS

(71) Applicant: CORNELL UNIVERSITY, Ithaca, NY (US)

(72) Inventors: Roy COHEN, Ithaca, NY (US); Alexander TRAVIS, Ithaca, NY (US)

(21) Appl. No.: 17/917,058

(22) PCT Filed: Apr. 6, 2021
(86) PCT No.: PCT/US2021/025979

§ 371 Date: Oct. 5, 2022

Related U.S. Application Data
(60) Provisional application No. 63/005,785, filed on Apr. 6, 2020.

(51) Int. Cl. C12Q 1/70; C12Q 1/6816

(52) U.S. Cl. CPC C12Q 1/701; C12Q 1/6816

(57) ABSTRACT

The present invention relates to a method of detecting a target at least partially single-stranded viral genome in a sample. Also disclosed are kits and reaction mixtures.

[0001] This application claims the priority benefit of U.S. Provisional Patent Application Ser. No. 63/005,785, filed Apr. 6, 2021, which is hereby incorporated by reference in its entirety.

### FIELD

[0002] The present application relates to the use of enzymes to detect viruses.

### BACKGROUND

[0003] The detection and/or quantitation of specific nucleic acid sequences is an important technique for identifying and classifying microorganisms, diagnosing infectious diseases, detecting and characterizing genetic abnormalities, identifying genetic changes associated with cancer, studying genetic susceptibility to disease, and measuring response to various types of treatment. Such procedures are also useful in detecting and quantitating microorganisms in foodstuffs, water, industrial and environmental samples, seed stocks, and other types of material where the presence of specific microorganisms may need to be monitored.

[0004] Advances in the field of molecular biology over the last 20 years have allowed the detection of specific nucleic acid sequences in test samples obtained from patients and other subjects. Such test samples include serum, urine, stool, saliva, amniotic fluid, and other body fluids. Thus, a number of methods to detect and/or quantitate nucleic acid sequences are well known in the art. However, an inherent result of highly sensitive nucleic acid amplification systems is the emergence of side-products. Side-products include molecules which may, in some systems, interfere with the amplification reaction, thereby lowering specificity. This is because limited amplification resources, including primers and enzymes needed in the formation of primer extension and transcription products are diverted to the formation of side-products. In some situations, the appearance of side-products can also complicate the analysis of amplicon production by various molecular techniques. In addition, in many cases of interest, specific nucleic acid sequences are present at very low concentrations in the sample being tested for the required nucleic acid sequence. In such cases, if the assay sensitivity cannot be increased, the presence of the required molecule cannot be detected.

[0005] The emergence of severe acute respiratory coronavirus 2 (SARS-CoV-2), which causes coronavirus disease 2019 (COVID-19) in humans, has highlighted the great need for a sensitive and specific assay for the detection of viruses.

[0006] The present application is directed to overcoming these and other deficiencies in the art.

### SUMMARY

[0007] One aspect of the disclosure is a method of detecting a target at least partially single-stranded viral genome in a sample. The method involves providing a sample containing a target at least partially single-stranded viral genome; providing an oligonucleotide molecule complementary to a selected portion of the target at least partially single-stranded viral genome adjacent to a single-stranded template region of the target at least partially single-stranded viral genome; contacting the sample with the oligonucleotide molecule so that the oligonucleotide molecule hybridizes to the selected portion of the target at least partially single-stranded viral genome and forms a hybridization product comprising a double-stranded nucleic acid start portion in the viral genome at a location corresponding to the selected portion and the single-stranded template region is adjacent to the double-stranded nucleic acid start portion; contacting the hybridization product with a polymerase and a dNTP mixture to form a polymerase extension mixture; subjecting the polymerase extension mixture to conditions under which the hybridization product from the double-stranded nucleic acid start portion is extended by addition of nucleotides complementary to the single-stranded template region, thereby releasing free phosphates; producing adenosine triphosphates from the released free phosphates; and metabolizing the adenosine triphosphates produced from the free phosphates to produce a readout signal, indicating the presence of the target at least partially single-stranded viral genome in the sample.

[0008] Another aspect of the present disclosure is a kit for detecting a target at least partially single-stranded viral genome in a sample. The kit includes: a polymerase; a dNTP mixture; one or more enzymes for producing adenosine triphosphates from released free phosphates; and a luciferase for producing a bioluminescent readout signal. In some embodiments, the kit further includes one or more oligonucleotide molecules complementary to a selected portion of a target at least partially single-stranded viral genome adjacent to a single-stranded template region of the target at least partially single-stranded viral genome.

[0009] Another aspect of the disclosure is a method of treating a human. The method involves: obtaining a sample from a human; determining a presence or an absence of at least a portion of a single-stranded viral genome in the sample by one or more of the methods of detecting a target described herein; and treating the human based on the presence or absence of at least a portion of the single-stranded genome in the sample.

[0010] Yet another aspect of the disclosure is a method of treating a non-human subject. The method involves: obtaining a sample from a non-human subject; determining a presence or an absence of at least a portion of a single-stranded viral genome in the sample by one or more of the methods of detecting a target described herein; and treating the non-human subject based on the presence or absence of at least a portion of the single-stranded genome in the sample.

### BRIEF DESCRIPTION OF THE DRAWINGS

[0011] FIGS. 1A-1B show a schematic of an exemplary embodiment of an assay according to methods described herein and a graph showing the theoretical range for PPi release per 1× copy of viral genome. FIG. 1A shows steps 1-9 of the exemplary assay according to methods described herein. Step 1 is the ID-Oligo design process, which in some embodiments involves (i) identifying uracil/thymine-free regions in the target at least partially single-stranded viral genome (ii) identifying virus-specific regions immediately 3′ or 5′ to those uracil/thymine-free regions (depending on whether the target virus has a positive or negative sense genome), where the reverse complement sequences of the virus-specific regions will be the “ID-Oligos”; (iii) selecting, based on (i) and (ii), one or more sequences for use as ID-Oligos that will hybridize with the genomic RNA/DNA (in some embodiments, ID-Oligos are between 6-25 nucleotides long); (iv) determining the number and specificity of ID-Oligos based on the detection goals, and nature of viral targets; (v) analyzing the one or more ID-Oligos for self-dimerization and cross-dimerization; and (iv) analyzing genomic ssRNA/ssDNA for areas of secondary structure that might inhibit ID-Oligo hybridization. Step 2 involves obtaining a sample. Step 3 involves the annealing of full or partial ssRNA/ssDNA (e.g., a viral genome from the sample or sample extract) with one or more ID-Oligos (each pre-designed to have a complementary sequence to the target domain within the viral genome as described herein). Step 4 involves the binding of reverse-transcriptase (RT) and/or DNA-Polymerase to the newly formed double strand RNA/DNA hybrid or dsDNA. Step 5 involves the extension of the complementary RNA/DNA strand from the hybridized ID-Oligos. Step 6 involves the release of phosphate groups (PPi, 2 per nucleotide added to the ssRNA/ssDNA strand) by the extension/polymerization reaction. Step 7 involves the conversion of released phosphates into ATP by downstream enzymatic reactions (e.g., in some embodiments, the enzymes are tethered enzymes). In some embodiments, free phosphates and APS (adenosine 5′-phosphosulfate) are converted into ATP by ATP-sulfurylase. In other embodiments, free phosphates along with NAD/GAP/ADP are converted into ATP by the coupled reaction of GAPDH-PGK. Step 8 involves metabolizing ATP by luciferase (e.g., soluble luciferase or luciferase tethered to nanoparticles) to produce bioluminescence as the readout signal. Step 9 involves quantifying the readout luminescence signal to determine the presence/relative abundance or concentration of the target viral genome. FIG. 1B shows the theoretical range for PPi release per 1× copy of the viral genome, as a function of the uracil/thymine-free region's length and the number of oligonucleotide molecules complementary to a selected portion of a target at least partially single-stranded viral genome (i.e., ID-Oligo or “primer”) included with a the reaction mixture.

[0012] FIG. 2 illustrates part of the process for the design of oligonucleotide molecules complementary to a selected portion of a target at least partially single-stranded viral genome (i.e., ID-Oligo or “primer”) shown in Step 2 of FIG. 1A. In the illustrated embodiment, ID-Oligo molecules were designed to bind adjacent to a uracil/thymine-free region in the target at least partially single-stranded viral genome (Table 11). FIG. 2 shows an alignment of sequences from Table 11 against genomes from 7 other coronaviruses. Colored regions (red or darker shaded) indicate misalignment between the sequences. The top panel in FIG. 2 shows the first portion of the sequence alignment. The bottom panel in FIG. 2 shows the second portion of the sequence alignment, with some overlap with the top panel.

[0013] FIG. 3 shows the results of analysis of ID-Oligos designed for the human coronavirus 229E using analytical software. FIG. 3 identifies ID-Oligos that self-dimerize and cross-dimerize with each other.

[0014] FIG. 4 is a schematic diagram illustrating a method of detecting a target at least partially single-stranded viral genome (“target viral genome”). The method involves providing an ID-Oligo (a “primer” or oligonucleotide molecule complementary to a selected portion of a target at least partially single-stranded viral genome) adjacent to a single-stranded region (“single-stranded template region”) of the target viral genome; contacting the ID-Oligo with the target viral genome so that the ID-Oligo hybridizes to the selected portion of the target viral genome and forms a hybridization product comprising a double-stranded nucleic acid start portion in the viral genome at a location corresponding to the selected portion and the single-stranded template region is adjacent to the double-stranded nucleic acid start portion; contacting the hybridization product with a polymerase (e.g., RT (shown) or DNA polymerase) and a dNTP mixture (comprising, e.g., dGTP, dCTP, dTTP, dATP, and/or dATPαS) to form a polymerase extension mixture; subjecting the polymerase extension mixture to conditions under which the hybridization product from the double-stranded nucleic acid start portion is extended by addition of nucleotides complementary to the single-stranded template region, thereby releasing free phosphates; and producing adenosine triphosphates from the released free phosphates (PPi). In the presence of adenosine 5′-phosphosulfate, the PPi groups are used by the enzyme ATP-sulfurylase to generate adenosine triphosphate (ATP). Luciferase hydrolyses the ATP to generate a bioluminescent signal (a readout signal), which indicates the presence of the target viral genome. NP: nanoparticles; ssDNA: single-strand deoxyribonucleic acid; ssRNA: single-strand ribonucleic acid; RT: reverse transcriptase; PPi/Pi: free phosphates; ATP-sul: ATP sulfurylase; ATP: adenosine triphosphate; APS: adenosine 5′-phosphosulfate; SO⁴⁺: sulfate; Lun: luciferin; Mg²⁺: magnesium; Luc: luciferase; and AMP: adenosine monophosphate.

[0015] FIG. 5 is a schematic diagram illustrating a method of detecting a target at least partially single-stranded viral genome (“target viral genome”). The method involves providing an ID-Oligo (a “primer” or oligonucleotide molecule complementary to a selected portion of a target at least partially single-stranded viral genome) adjacent to a single-stranded region (“single-stranded template region”) of the target viral genome; contacting the ID-Oligo with the target viral genome so that the ID-Oligo hybridizes to the selected portion of the target viral genome and forms a hybridization product comprising a double-stranded nucleic acid start portion in the viral genome at a location corresponding to the selected portion and the single-stranded template region is adjacent to the double-stranded nucleic acid start portion; contacting the hybridization product with a polymerase (e.g., RT (shown) or DNA polymerase) and a dNTP mixture (comprising, e.g., dGTP, dCTP, dTTP, and optionally dATP, and/or dATPαS) to form a polymerase extension mixture; subjecting the polymerase extension mixture to conditions under which the hybridization product from the double-stranded nucleic acid start portion is extended by addition of nucleotides complementary to the single-stranded template region, thereby releasing free phosphates; and producing adenosine triphosphates from the released free phosphates (PPi). In the presence of ADP, NAD⁺, and GAP, these PPi groups are used by the coupled GAPDH-PGK enzymatic reaction to generate ATP. Luciferase hydrolyses the ATP to generate a bioluminescence signal (a readout signal), which indicates the presence of the target viral genome. NP: nanoparticles; ssDNA: single-strand deoxyribonucleic acid; ssRNA: single-strand ribonucleic acid; RT: reverse transcriptase; PPi/Pi: free phosphates; NAD⁺/NADH: nicotinamide adenine dinucleotide; GAP: glyceraldehyde 3-phosphate; GAPDH: glyceraldehyde 3-phosphate dehydrogenase; PGK: phosphoglycerate kinase; ATP: adenosine triphosphate; 3PG: 3-phosphoglyceric acid; Lun: luciferin; Mg: magnesium; Luc: luciferase; and AMP: adenosine monophosphate.

[0016] FIGS. 6A-6C demonstrate the use of ID-Oligos (i.e., oligonucleotide molecules complementary to a selected portion of a target at least partially single-stranded viral genome (“primer”)) to detect 3 synthetic fragments of the SARS-CoV-Urbani genome using the method described in FIG. 4. FIG. 6A shows the sequence of the three synthetic ssDNA partial sequences of the SARS coronavirus Urbani virus genome (IDT, Iowa USA)

(SEQ ID NO: 276)
(SARS-C-U#1:
(5′)CTAAACAAGAGGAGCCACCAAACACAGAAGATTCCAAAACTGAGGA
GAAATCTGTCGTACA (3′);
(SEQ ID NO: 277)
SARS-C-U#2:
(5′)GGTAAAGGCCAACAACAACAAGGCCAAACTGTCACTAAGAAATCTG
CTGCTGAGG(3′);
(SEQ ID NO: 278)
SARS-C-U#3:
(5′)CTAAAAAGGACAAAAAGAAAAAGACTGATGAAGCTCAGCCTTTGCC
GCAGAG(3′)).

Each synthetic sequence includes a thymine-free region (bold) and a target sequence for the ID-Oligo to bind (underline). FIG. 6B is a table showing the main properties of the synthetic genome fragments shown in FIG. 6A, including the length in nucleotides of the thymine-free region (T-Free (L)), the length in nucleotides of the ID-Oligo (Oligo (L)), the melting temperature of the ID-Oligo (Tm, provided in Celsius), and the GC content of the ID-Oligos (GC %). FIG. 6C is a graph showing the luminescent signal generated by the reaction according to the methods of the disclosure in the presence of each of the 3 synthetic genome fragments and negative controls (reactions lacking the synthetic genome fragments). The master mix included: His-Si-Luc (0.8 μl), ATPS (NEB, 0.8 μl), BST (DNA Polymerase, 0.8 NEB), buffer (HEPES, MgCl₂, NaCl, pH7.4), luciferin (1 mM), APS (0.06 mM), dNTP mix (0.05 mM of each dTTP, dCTP, dGTP). The master mix was added to individual wells in a 96-well microplate containing ID-Oligos, as indicated in FIG. 6A, and a SARS-CoV-Urbani sequence or water. Luminescent signal was integrated every 0.4 seconds and measured for up to 50 minutes at room temperature.

[0017] FIGS. 7A-7B shows a comparison of three different reverse transcriptase (RT) enzymes when using the methods described in FIG. 4 to detect RNA isolated from Zika virus. FIG. 7A is a graph showing the results of three reactions, each including one of the following RTs: ProtoScript® II RT, M-MuLV RT, and AMV RT (New England Biolabs, MA, USA). The master mix used for each reaction included His-Si-Luc (0.8 μl), ATPS (NEB, 0.8 μl), buffer (HEPES, MgCl₂, NaCl, pH7.4), luciferin (1 mM), APS (0.06 mM), and dNTP mix (0.0 5 mM of each dTTP, dCTP, dGTP). Master mix was added to individual wells in a 96-well microplate containing RTs as indicated in FIG. 7A (2 all from NEB), and RNA or water. Luminescent signal was integrated every 0.4 seconds and measured for up to 50 minutes at room temperature. FIG. 7B is a graph showing the assay kinetics as measured from the reaction initial slope (calculated for the linear region during 0-400 seconds). Slope (LU/time) is one way to analyze the reaction signal. Other approaches include, for example, calculating the integrated signal over a defined time frame, maximal peak signal, peak signal normalized to the baseline LU, peak to slope ratio, and various combinations two or more of these approaches.

[0018] FIG. 8 demonstrates the ability of the ID-Oligos to distinguish between RNA from different viral species. A set of ID-Oligos specific for regions within the Zika virus genome were mixed with the assay reagents, which included His-Si-Luc (20 μl), ATPS (NEB, 1 μl), buffer (HEPES, MgCl₂, NaCl, pH7.4), luciferin (10 mM), APS (0.06 mM), dNTP mix (0.05 mM of each dTTP, dCTP, dGTP). The master mix was then added to individual wells in a 96-well microplate containing RNA from Zika virus (strain KX26887.1), Hepatitis C virus (strain JFH-1), or water, and primers designed to identify the Zika RNA. Luminescent signal was integrated every 0.4 seconds, and measured for up to 50 minutes at room temperature. The data in FIG. 8 show that using Zika-specific ID-Oligos did not result in cross-reactivity with RNA from Hepatitis C virus. Both Zika and Hepatitis C are RNA viruses in the same viral family (Flaviviridae).

[0019] FIG. 9 is a graph showing experimental results which demonstrate that ID-Oligos can be used to detect a target single-stranded viral genome in a sample comprising human serum and human saliva. Assay reagent mixtures comprising His-Si-Luc (20 μl), ATPS (NEB, 1 μl), Klenow (1 μl, NEB), buffer (HEPES, MgCl₂, NaCl, pH7.4), luciferin (10 mM), APS (0.06 mM), dNTP mix (0.05 mM of each dTTP, dCTP, dGTP), and oligos (1 μm of each of 3 oligos) were prepared as a master mix. The master mix was added to individual wells in a 96-well microplate containing ssDNA diluted in saliva or serum, and luminescence signal was measured for up to 50 minutes (at room temperature).

[0020] FIGS. 10A-10F demonstrate the reaction kinetics for detection of RNA isolated from the common human coronavirus 229E in the presence of various ID-Oligos. In brief, 19 different ID-Oligos (corresponding to SEQ ID NOs:251-269) were added to the reaction mixture in the presence of 0.1 pg RNA isolated from human coronavirus 229E (ATCC). FIGS. 10A-10D show the reaction kinetics in the presence of individual ID-Oligos 1-5 (corresponding to SEQ ID NOs:251-255, respectively) (FIG. 10A), ID-Oligos 6-10 (corresponding to SEQ ID NOs:256-260, respectively) (FIG. 10B), ID-Oligos 11-15 (corresponding to SEQ ID NOs:261-265, respectively) (FIG. 10C), ID-Oligos 17-19 (corresponding to SEQ ID NOs:267-269, respectively) (FIG. 10D). FIG. 10E shows the reaction kinetics in the presence of mixtures of ID-Oligos 1-9 (corresponding to SEQ ID NOs:251-259, respectively) and ID-Oligos 10-19 (corresponding to SEQ ID NOs:260-269, respectively), or in the presence of a set of ID-Oligos designed to detect the Zika virus. FIG. 10F is a summary of the reaction kinetics (slope) in the presence of each ID-Oligo and combinations. The mixture included: His-Si-Luc (20 μl), ATPS (NEB, 1 μl), ProtoScript® II RT (1 μl, NEB), buffer (HEPES, MgCl₂, NaCl, pH7.4), luciferin (10 mM), APS (0.06 mM), dNTP mix (0.05 mM of each dTTP, dCTP, dGTP), and ID-Oligos (as indicated, 1 micromolar of each). Master mix was added to individual wells in a 96-well microplate containing RNA or water (as indicated) and luminescence signal was measured for up to 50 minutes (at room temperature).

[0021] FIGS. 11A-11C demonstrate the use of dATPαS to enable inclusion of ID-Oligos targeting non-uracil/thymine-free regions of a target single-stranded viral genome isolated from a SARS-CoV-2, USA-WA1/2020 oropharyngeal swab (BEI Cat #NR-52285). The sequence of this genome corresponds to GenBank Accession No. MN985325, which is hereby incorporated by reference in its entirety (SEQ ID NO:279, see Table 9). FIG. 11A shows the structural differences between dATP and dATPαS. FIG. 11B shows data from a reaction including only the luciferase and no viral RNA. Specifically, FIG. 11B is a graph showing that replacing dATP with dATPαS reduces the background LU in the ID-Oligos assay reaction, if one wishes to use ID-Oligos that are not adjacent to uracil/thymine-free regions. Master mix for 5 reactions included: His-Si-Luc (5 μl), buffer (HEPES, MgCl₂, NaCl, pH7.4), luciferin (10 mM), APS, dNTP mix (0.06 mM of each dTTP, dCTP, dGTP) and either 0.1 mM/1 mM of dATP, 0.1 mM/1 mM of dATPαS or water. The plot shows the reduction in the LU background when using dATPαS versus dATP, which provides a significantly improved signal-to-noise ratio (— 2 orders of magnitude) and thus higher overall sensitivity of the assay. FIG. 11C is a graph showing the comparison of ID-Oligos reaction signal output with only dC/T/G or with dC/T/C+dATPαS. A master mix for reactions included: His-Si-Luc (5 μl), ATPS (NEB, 0.2 μl), ProtoScript® II RT (NEB, 0.2 μl), buffer (HEPES, MgCl₂, NaCl, pH7.4), luciferin (10 mM), APS (0.06 mM), dNTP mix (0.05 mM of each dTTP, dCTP, dGTP), +/−0.1 mM dATPαS, and oligo mix (ID-Oligos corresponding to SEQ ID NOs:30-48 of Table 11 (i.e., ID-Oligos having the sequence of SEQ ID NOs:110-128 of Table 11)+ID-Oligos corresponding to SEQ ID NOs:69-89 of Table 11 (i.e., ID-Oligos having sequence of SEQ ID NOs:149-169 of Table 11)). Blue bars (left bar in each set)—reaction slopes when only dT/G/C's are included. Red bars (right bar in each set)—reaction slopes when supplemented with dATPαS. Higher slope values indicate more dynamic assay kinetics due to the longer polymerization reaction step by the RT.

[0022] FIG. 12 shows the inhibitory effect of Na-Azide on the luminescence output of the coupled ATPS-luciferase reaction. Master mix was prepared for 2 reactions by combining His-Si-Luc (5 μl), His-Si-ATPS (5 μl), buffer (HEPES, MgCl₂, NaCl, pH7.4), luciferin (10 mM), APS (0.33 mM), and NaPPi (2.2 mM). One well was supplemented with 0.04% Na-Azide, and LU was measured for 200 seconds.

[0023] FIG. 13 demonstrates that different methods of ID-Oligo preparation/purification do not add to background LU. To check if ID-Oligos add any background LU due to carry over of PPi produced during their synthesis process, ID-Oligo purification via HPLC and standard desalting (salt exchange) were evaluated in comparison to non-purified ID-Oligos (control). Master mix included: His-Si-Luc (10 ul), buffer (HEPES, MgCl₂, NaCl, pH7.4), luciferin (10 mM), ATPS (1 μl, NEB), and APS (0.33 mM). 97 μl of master mix was added to wells (96-well microplate) containing 3 μl of 100 μM of ID-Oligos, or water (no oligo-control). LU was measured for up to 50 minutes.

[0024] FIGS. 14A-14B demonstrate the detection of synthetic SARS-CoV-2 using an exemplary 2-step assay according to methods described herein. In this version of the assay, the reverse transcriptase (RT) (Mu-MLV) was mixed with ID-Oligos, reagents, and RNA for an initial hybridization/polymerization step (Step I). Then, the luciferase (Luc) and ATPS were added to transduce PPi formation (by the RT) into ATP and luminescence (Step II). Master mix comprising His-Si-Mu-MLV (7 μl), buffer (HEPES, MgCl₂, NaCl, pH7.4), luciferin (10 mM), oligo (CV3-oligo, 1 micromolar), APS (0.33 mM), and RNA (synthetic SARS-CoV-2 (CV3, 0.3 micromolar) or water (“-RNA” control reaction) was prepared for two reactions. 88 μl of master mix was added to wells (96-well microplate), and luminescence (LU) was measured for 250-300 seconds (Step I). At 250/300 second, a mix of His-Si-Luc (5 μl) and His-Si-ATPS (6 μl) was added to both wells to initiate step II of the reaction. FIG. 14A shows the results of the ID-Oligos assay using enzymes in solution. FIG. 14B shows the results of the ID-Oligos assay using enzymes attached to NPs (500 nm, SiO₂). The data (i) confirm that luminescence is not detected until addition of luciferase and ATPS and (ii) demonstrate that the Oligo-ID assay may be carried out using enzymes in solution or enzymes attached to NPs.

[0025] FIG. 15 is a graph demonstrating that different ATPS/RT ratios affect reaction kinetics. A reaction master mix for 7 reactions was prepared comprising His-Si-Luc (10 μl), buffer (HEPES, MgCl₂, NaCl, pH7.4), luciferin (10 mM), APS (0.33 mM), dNTP mix (0.05 mM of each dTTP, dCTP, dGTP, and dATPαS), 40× oligo mix, SARS-CoV-2 RNA (#N-52285, 1:500 dilution), Mu-MLV RT (0.2 ul NEB[200 U/μl]), and increasing volumes of ATPS (NEB [3 U/μl]). Master mix was added to wells (96-well microplate) containing ATPS or water (no oligo) to result in the following unit ratios of ATPS/RT: 0, 0.0015, 0.003, 0.0075, 0.015, 0.03, 0.075. LU was measured for up to 50 minutes.

[0026] FIGS. 16A-16C show the detection of SARS-CoV-2 RNA in saliva or nasopharyngeal samples from patients diagnosed with COVID-19. Paired saliva (S) and nasopharyngeal (NP) samples were collected from patients known to have confirmed COVID-19 infection (Guthrie Medical Center, Sayre, Pa.). FIG. 16A and FIG. 16B are graphs showing the change in luminescence (LU) over time in the saliva sample (FIG. 16A) and nasopharyngeal sample (FIG. 16B), respectively. FIG. 16C is a bar plot showing the rate of luminescence output (slope) as a function of RNA quantity in individual wells.

[0027] FIG. 17 is graph showing the detection of SARS-CoV-2 RNA in pooled saliva from patients diagnosed with COVID-19. RNA extracted from saliva (S) of 4 donors were pooled into a single sample (collected from patients known to have confirmed COVID-19 infection, Guthrie Medical Center, Sayer Pa.). FIG. 17 shows the change in luminescence units (LU, normalized to time point 0) over time.

[0028] FIG. 18 is a graph showing the detection of SARS-CoV-2 RNA in nasopharyngeal (NP) samples from COVID-19 positive or negative donors. RNA extracted from NP samples collected from 1 confirmed Covid-19 positive donor (#17) and 1 confirmed negative donor (#14) Guthrie Medical Center, Sayre, Pa.). FIG. 18 shows the change in luminescence units (LU, normalized to time point 0) over time.

### DETAILED DESCRIPTION

[0029] Unless otherwise indicated, the definitions and embodiments described in this and other sections are intended to be applicable to all embodiments and aspects of the present application herein described for which they are suitable as would be understood by a person skilled in the art.

[0030] As used herein, the singular forms “a,” “an,” and “the” and the like include plural referents unless the context clearly dictates otherwise. Thus, for example, reference to “a compound” includes both a single compound and a plurality of different compounds.

[0031] Terms of degree such as “substantially”, “about”, and “approximately” as used herein mean a reasonable amount of deviation of the modified term such that the end result is not significantly changed. These terms of degree should be construed as including a deviation of at least ±1% (and up to ±5% or ±10%) of the modified term if this deviation would not negate the meaning of the word it modifies.

[0032] The term “and/or” as used herein means that the listed items are present, or used, individually or in combination. In effect, this term means that “at least one of” or “one or more” of the listed items is used or present.

[0033] As will be understood by one skilled in the art, for any and all purposes, such as in terms of providing a written description, all ranges disclosed herein also encompass any and all possible subranges and combinations of subranges thereof. Any listed range can be easily recognized as sufficiently describing and enabling the same range being broken down into at least equal halves, thirds, quarters, fifths, tenths, and so on. As a non-limiting example, each range discussed herein can be readily broken down into a lower third, middle third and upper third, and so on. As will also be understood by one skilled in the art all language such as “up to,” “at least,” and the like include the number recited and refer to ranges which can be subsequently broken down into subranges as discussed above. Finally, as will be understood by one skilled in the art, a range includes each individual member.

[0034] In understanding the scope of the present application, the term “comprising” and its derivatives, as used herein, are intended to be open ended terms that specify the presence of the stated features, elements, components, groups, integers, and/or steps, but do not exclude the presence of other unstated features, elements, components, groups, integers and/or steps. The foregoing also applies to words having similar meanings such as the terms, “including”, “involving”, “having”, and their derivatives. The term “consisting” and its derivatives, as used herein, are intended to be closed terms that specify the presence of the stated features, elements, components, groups, integers, and/or steps, but exclude the presence of other unstated features, elements, components, groups, integers and/or steps. The term “consisting essentially of”, as used herein, is intended to specify the presence of the stated features, elements, components, groups, integers, and/or steps as well as those that do not materially affect the basic and novel characteristic(s) of features, elements, components, groups, integers, and/or steps. In embodiments or claims where the term comprising (or the like) is used as the transition phrase, such embodiments can also be envisioned with replacement of the term “comprising” with the terms “consisting of” or “consisting essentially of.” The methods, kits, systems, and/or compositions of the present disclosure can comprise, consist essentially of, or consist of, the components disclosed.

[0035] In embodiments comprising an “additional” or “second” component, the second component as used herein is different from the other components or first component. A “third” component is different from the other, first, and second components, and further enumerated or “additional” components are similarly different.

[0036] Certain terms employed in the specification, examples and claims are collected herein. Unless defined otherwise, all technical and scientific terms used in this disclosure have the same meanings as commonly understood by one of ordinary skill in the art to which this disclosure belongs.

[0037] Preferences and options for a given aspect, feature, embodiment, or parameter of the invention should, unless the context indicates otherwise, be regarded as having been disclosed in combination with any and all preferences and options for all other aspects, features, embodiments, and parameters of the invention.

[0038] Embodiments herein relate to assays useful in the detection of the presence of absence of viral genomic nucleic acids in a sample, as well as individual components of those assays, combinations of components of those assays, and related kits, devices, compositions, systems, and methods.

[0039] One aspect of the disclosure is a method of detecting a target at least partially single-stranded viral genome in a sample. The method involves providing a sample containing a target at least partially single-stranded viral genome; providing an oligonucleotide molecule complementary to a selected portion of the target at least partially single-stranded viral genome adjacent to a single-stranded template region of the target at least partially single-stranded viral genome; contacting the sample with the oligonucleotide molecule so that the oligonucleotide molecule hybridizes to the selected portion of the target at least partially single-stranded viral genome and forms a hybridization product comprising a double-stranded nucleic acid start portion in the viral genome at a location corresponding to the selected portion and the single-stranded template region is adjacent to the double-stranded nucleic acid start portion; contacting the hybridization product with a polymerase and a dNTP mixture to form a polymerase extension mixture; subjecting the polymerase extension mixture to conditions under which the hybridization product from the double-stranded nucleic acid start portion is extended by addition of nucleotides complementary to the single-stranded template region, thereby releasing free phosphates; producing adenosine triphosphates from the released free phosphates; and metabolizing the adenosine triphosphates produced from the free phosphates to produce a readout signal, indicating the presence of the target at least partially single-stranded viral genome in the sample. In some embodiments the single-stranded template region is a uracil/thymine-free region.

[0040] Also contemplated are methods of detecting the presence or absence of a target at least partially single-stranded viral genome (target viral genome) in a sample. In some embodiments, the method involves carrying out the steps of the methods described herein, wherein the target viral genome is present in the sample and a readout signal is produced. In some embodiments, the method involves carrying out the steps of the methods described herein, wherein the target viral genome is not present in (or is absent from) the sample and a readout signal is thereby not produced. For example, in some embodiments, the sample is contacted with an oligonucleotide molecule complementary to a selected portion of a target viral genome under conditions whereby the oligonucleotide molecule hybridizes to the selected portion of the target viral genome (if present in the sample) to form a hybridization product. The sample is contacted with a polymerase and a dNTP mixture and subjected to conditions under which the hybridization product (if present) is extended from a double-stranded nucleic acid start portion by addition of nucleotides complementary to a single-stranded template region, as described herein, (if present) thereby releasing free phosphates. Where the target viral genome is absent from the sample, adenosine triphosphates are not produced from free phosphates released as a result of a polymerization extension reaction, the adenosine triphosphates are thereby not metabolized, and a readout signal is not produced; absence of the readout signal indicates the absence of the target viral genome in the sample.

[0041] An exemplary embodiment is shown schematically in FIG. 1A. In this embodiment, there are nine steps. It will be understood that although shown and described in connection with this exemplary embodiment, each step (or various combinations thereof) may be used in accordance with any embodiment of the disclosure. As shown in FIG. 1A, step 1 an the ID-Oligo design process, which may involve (i) identifying uracil/thymine-free regions in the target at least partially single-stranded viral genome (ii) identifying virus-specific regions immediately 3′ or 5′ to those uracil/thymine-free regions (depending on whether the target virus has a positive or negative sense genome), where the reverse complement sequences of the virus-specific regions will be the “ID-Oligos”; (iii) selecting, based on (i) and (ii), one or more sequences for use as ID-Oligos that will hybridize with the genomic RNA/DNA in some embodiments, ID-Oligos are between 6-25 nucleotides long); (iv) determining the number and specificity of ID-Oligos based on the detection goals and the nature of the target at least partially single-stranded viral genome; (v) analyzing the one or more ID-Oligos for self-dimerization and cross-dimerization; and (iv) analyzing genomic ssRNA/ssDNA for areas of secondary structure that might inhibit ID-Oligo hybridization.

[0042] Depending on the objectives, and as described herein, ID-Oligos may be designed to hybridize with regions conserved within a family or genus of viruses (e.g., to identify any betacoronavirus, if that is the target) or to one or more regions specific to an individual species of virus (e.g., SARS-CoV), or to one or more regions specific to an individual strain of virus (e.g., SARS-CoV-2), or to one or more regions specific to an individual variant of a strain of virus (e.g., SARS-CoV-2 variant B.1.1.7, B.1.351, P.1, B.1427, B.1.429, B.1.526, B.1.525, or P.2).

[0043] One example of considering the detection goals and nature of the target at least partially single-stranded viral genome as outlined in Step 1 of FIG. 1A is the design of a general screen for influenza viruses to include multiple ID-Oligos (e.g., an array) that would be robust to the rapid evolution of influenza virus strains, due to mutation and re-assortment. Similarly, a general screen for HIV could involve multiple ID-Oligos that would be robust to the rapid evolution by point mutations and natural selection. In contrast, a number of highly specific ID-Oligos could be chosen to detect a specific strain of influenza that might help pinpoint vaccine priorities or might help identify emergence of drug resistance in strains of HIV. In an exemplary embodiment, FIG. 1B shows the theoretical range for PPi release per 1× copy of the target single-stranded viral genome, as a function of the template regions length (e.g., the length of a uracil/thymine-free region) and the number of oligonucleotide molecules complementary to a selected portion of a target at least partially single-stranded viral genome (i.e., ID-Oligo or “primer”) included with a the reaction mixture. In some embodiments of the methods and kits described herein, uracil/thymine-free regions are selected with their length in mind, because longer stretches will produce a stronger signal. This guiding process simplifies, streamlines, and accelerates the selection of regions to serve as the oligonucleotide molecules complementary to a selected portion of a target at least partially single-stranded viral genome (i.e., ID-Oligos).

[0044] In the exemplary embodiment of FIG. 1A, step 2 involves obtaining a sample (FIG. 1A). If a sample (e.g., a patient sample, water sample, food sample, animal product, etc.) contains free single-strand nucleic acid targets (e.g., ssRNA or ssDNA), it can be used directly. If a sample contains nucleic acid targets that are enclosed within full virions or capsids, then the nucleic acid targets would need to be extracted by one or more means, including those currently commercially available or those engineered into a ID-Oligo detection system. Thus, the assay according to methods described herein may be carried out using various biological fluids including, for example, plasma, serum, and saliva. In some embodiments, the assay according to methods described herein is carried out using tissue, cell, semen, vaginal fluid, sputum, and mucus samples. The biological samples may, for example, be collected on a swab (e.g., a nasal swab). Depending on the viral load/titer and the availability/concentrations of free nucleic acids in a given sample, the assay according to methods described herein described herein can be carried out using non-processed samples (e.g., detecting free/circulating RNA/DNA in the biological fluid) or isolated RNA/DNA (e.g., isolation can be achieved by any means of nucleic acid isolation including, without limitation, commercial kits, off-the-shelf reagents, and the like).

[0045] In some embodiments the sample is contacted with one or more reagents selected from the group consisting of phospholipid-disrupting detergents, enzymes that break down the viral membrane envelope (e.g., phospholipases, α-Hemolysin), and proteases which break open the viral capsid (e.g., Proteinase K). Such reagents may aid in the release of DNA/RNA from the viral envelope and/or virion. In accordance with such embodiments, tethering the enzymes to solid supports such as nanoparticles enables physical and spatial separation between the virus-lysing enzymes/reagents and the enzymes producing the bioluminescent readout. Thus, a built-in virus lysis step could be performed in different ways: (i) lysis and polymerization/luminescence may occur simultaneously and in the same space (e.g., in a common well or region of a device); (ii) lysis and polymerization/luminescence may occur in-line serially in a microfluidic or paper chromatography system (or similar system in which the sample containing viral RNA/DNA is delivered at an upstream site and then moved through the system via capillary action or flow generated by a pump or other system), with the lytic enzymes/reagents localized upstream of the ID-Oligos and enzymes producing luminescence; or (iii) lysis and polymerization/luminescence may occur separately and sequentially, where the lysis occurs in one step, and the isolated RNA/DNA is then added to the polymerization/luminescence reaction mixture in a separate device/container.

[0046] In the exemplary embodiment of FIG. 1A, step 3 involves the annealing of full or partial ssRNA/ssDNA (e.g., a viral genome from the sample or sample extract) with one or more ID-Oligos (each pre-designed to have a complementary sequence to the target domain within the viral genome as described herein) (FIG. 1A).

[0047] In the exemplary embodiment of FIG. 1A, step 4 involves the binding of reverse-transcriptase (RT) and/or DNA-Polymerase (depending on whether the template region is RNA or DNA) to the newly formed double strand RNA/DNA hybrid or dsDNA (FIG. 1A). Various polymerases can be used. To improve efficiency, kinetics, stability and/or positioning within a detection device, the polymerase may be tethered to a nanoparticle.

[0048] In the exemplary embodiment of FIG. 1A, step 5 involves the extension of complementary RNA/DNA strand from the hybridized ID-Oligos (FIG. 1A). The polymerization extension reaction may occur using available nucleotides provided in a dNTP mix added to the reaction buffer (dCTP/dGTP/dTTP). In this exemplary embodiment, lack of inclusion of dATP is made possible by earlier selection of the uracil/thymine-free regions. Alternatively, to generate longer regions for extension (increasing signal per genome), dATP analogs with lower ability to be hydrolyzed by luciferase can be used (e.g., thio-derivatives of dATP, dATPαS).

[0049] In the exemplary embodiment of FIG. 1A, step 6 involves the release of phosphate groups (PPi, 2 per nucleotide added to the ssRNA/ssDNA strand) by the polymerization extension reaction (FIG. 1A). A longer template region (e.g., a uracil/thymine-free region) will produce more PPi and a stronger signal.

[0050] In the exemplary embodiment of FIG. 1A, step 7 involves the conversion of released phosphates into ATP by downstream enzymatic reactions (e.g., in some embodiments, the enzymes are enzymes tethered to a support (e.g., a nanoparticle)) (FIG. 1A). In some embodiments, free phosphates and APS (adenosine 5′-phosphosulfate) are converted into ATP by ATP-sulfurylase. In some embodiments, free phosphates along with NAD/GAP/ADP are converted into ATP by the coupled reaction of GAPDH-PGK.

[0051] In the exemplary embodiment of FIG. 1A, step 8 involves luciferase (e.g., soluble luciferase or luciferase tethered to nanoparticles) metabolizing ATP to produce bioluminescence as the readout signal (FIG. 1A).

[0052] In the exemplary embodiment of FIG. 1A, step 9 involves quantifying the readout luminescence signal to determine the presence/relative abundance or concentration of the target viral genome (FIG. 1A).

[0053] Another embodiment is shown schematically in FIG. 4. In this embodiment, a polymerase (in this case, reverse transcriptase (RT)) is tethered to one nanoparticle (NP), and ATP sulfurylase (ATP-sul) and luciferase (Luc) are tethered to another nanoparticle. One or more virus-specific primer(s) (ID-Oligo(s)) anneal to the complementary sequence (single-strand ribonucleic acid (ssRNA) or single-strand deoxyribonucleic acid (ssDNA)) within a target viral genome (or portion or fragment thereof), and a double-strand (i.e., hybridization product) is generated. This allows the polymerase to bind and initiate the polymerization extension reaction, thereby releasing free phosphates (PPi) through nucleotide incorporation into the growing strand. Adenosine 5′-phosphosulfate (APS) is provided for the assay. In the presence of APS, the free phosphates are used by the tethered ATP-sul to generate ATP. In conjunction with luciferin, the ATP will then be used by tethered Luc to generate a bioluminescent signal. The amount of light emitted is directly proportional to the amount of ATP in the system, thereby corresponding to the amount of target viral genomic nucleic acid in the system. Light emitted may, in one embodiment, be read quantitatively and/or qualitatively by a photodetector positioned to capture that emitted signal. In certain embodiments described herein, the assay may be carried out within, e.g., a microfluidic channel of a device. Such a device may include a plurality of microfluidic channels, each channel containing components for an assay as described herein.

[0054] In a further embodiment, as shown in FIG. 5, a polymerase (in this case, reverse transcriptase (RT)) is tethered to one nanoparticle (NP) and glyceraldehyde 3-phosphate dehydrogenase (GAPDH), phosphoglycerate kinase (PGK), and luciferase (Luc) are tethered to another nanoparticle. One or more virus-specific primer(s) (ID-oligo(s)) anneal to the complementary sequence (single-strand ribonucleic acid (ssRNA) or single-strand deoxyribonucleic acid (ssDNA)) within a target viral genome (or portion or fragment thereof), and a double-strand (i.e., hybridization product) is generated. This allows the polymerase to bind and initiate the polymerization extension reaction, thereby releasing free phosphates (PPi) through nucleotide incorporation into the growing strand. ADP, NAD⁺, and glyceraldehyde 3-phosphate (GAP) are provided for the assay. In the presence of these components, the free phosphates are used by the tethered GAPDH and PGK in a coupled reaction to generate ATP. In conjunction with luciferin, the ATP will then be used by tethered Luc to generate a bioluminescent signal. The amount of light emitted is directly proportional to the amount of ATP in the system, thereby corresponding to the amount of target viral genomic nucleic acid in the system. Light emitted may, in one embodiment, be read quantitatively and/or qualitatively by a photodetector positioned to capture that emitted signal. In certain embodiments described herein, the assay may be carried out within, e.g., a microfluidic channel of a device. Such a device may include a plurality of microfluidic channels, each channel containing components for an assay as described herein.

[0055] The term “nucleic acid” refers to polymers of nucleotides (e.g., ribonucleotides and/or deoxyribonucleotides, both natural and non-natural) including DNA, RNA, and their subcategories, such as cDNA, mRNA, miRNA etc. A nucleic acid may be single-stranded and will generally contain 5′-3′ phosphodiester bonds, although in some cases, nucleotide analogs may have other linkages. Nucleic acids may include naturally occurring bases (adenine, guanine, cytosine, uracil, thymine) as well as non-natural bases.

[0056] As used herein, the terms “target at least partially single-stranded viral genome” or “target” refer to the nucleic acid sequence or portion or fragment thereof in a viral genome which is to be detected or analyzed. The term target includes all variants of the target at least partially single-stranded viral genome or target sequence, e.g., one or more viral variants and the wild type viral genome.

[0057] The target at least partially single-stranded viral genome (also referred to herein as the target, the target viral genome, or the like) may be any portion or fragment of a viral genome. In some embodiments, the target at least partially single-stranded viral genome is entirely single-stranded. In some embodiments, the target at least partially single-stranded viral genome is partially single-stranded.

[0058] The target viral genome may be from a virus that naturally possesses at least a partially single-stranded (ss) genome. The target viral genome may be a single-stranded RNA (positive or negative) viral genome or single-stranded DNA (positive or negative) viral genome.

[0059] The target viral genome may also be from a virus that naturally possesses a double-stranded RNA or DNA genome, which is subjected to a treatment to separate the strands of the double-stranded DNA to produce a single-strand from the double-stranded viral genome. The treatment used to separate the strands of the double-stranded DNA or RNA to produce a single-strand from the double-stranded viral genome may include, for example, contacting the double-stranded DNA or RNA with one or more a reagents (e.g., a helicase, topoisomerase, DNA polymerase, and endonuclease), thereby displacing one of the strands to produce a single-strand from the double-stranded viral genome. Such reagents may be provided and contacted with the sample prior to the methods described herein, or as part of the methods described herein. For example, in some embodiments, the step of processing the sample to, e.g., separate nucleic acids from other components of the sample may be carried out prior to providing the sample according to the methods described herein. In some embodiments, the step of processing the sample to, e.g., separate nucleic acids from other components of the sample may be carried out as part of the methods described herein. Such reagents may also be provided tethered to a solid support. Suitable solid supports are described herein. See FIGS. 4-5.

[0060] In some embodiments, the target viral genome is from a single-stranded positive-sense RNA virus (e.g., a virus from the family Arteriviridae, Coronaviridae, Flaviviridae, Togaviridae, Matonaviridae, Retroviridae, Caliciviridae, Hepeviridae, or Picornaviridae) or single-stranded negative-sense RNA virus (e.g., a virus from the family Arenaviridae, Deltavirus, Filoviridae, Orthomyxoviridae, Nairoviridae, Paramyxoviridae, Peribunyaviridae, Pneumoviridae, or Rhabdoviridae) (see, e.g., Payne S, “Introduction to RNA Viruses,” Viruses 97-105(2017), which is hereby incorporated by reference in its entirety). The RNA virus may be an enveloped or non-enveloped virus. Exemplary single-stranded RNA viruses include, without limitation, those identified in Table 1 below.

TABLE 1
Exemplary Single-Stranded RNA Viruses

| | | |
|---|---|---|
| Family | Genus/Genera | Exemplary Viruses |

Single-Stranded Positive-Sense Enveloped RNA Viruses

| | | |
|---|---|---|
| Coronaviridae | Alphacoronavirus | Human coronavirus 229E, Human coronavirus |
| | | NL63, Human coronavirus 2JL14 |
| | Betacoronavirus | Human coronavirus OC43, Human coronavirus |
| | | HKU1, Severe Acute Respiratory Syndrome |
| | | Coronavirus (SARS-CoV), Severe Acute |
| | | Respiratory Syndrome Coronavirus 2 (SARS-CoV- |
| | | 2), Severe Acute Respiratory Syndrome |
| | | Coronavirus Urbani (SARS-CoV-Urbani), Middle |
| | | East Respiratory Syndrome Coronavirus (MERS- |
| | | CoV) |
| Flaviviridae | Flavivirus | Yellow Fever virus, Dengue virus 1, Dengue virus |
| | | 2, Dengue virus 3, Dengue virus 4, Japanese |
| | | Encephalitis virus, West Nile virus, Kunjin virus, |
| | | St. Louis encephalitis virus, Murray Valley |
| | | encephalitis virus, Usutu virus, Koutango virus, |
| | | Zika virus, Tick-borne encephalitis, Kyasanur |
| | | Forest disease virus, Alkhurma hemorrhagic fever |
| | | virus, Omsk hemorrhagic fever virus, Powassan |
| | | virus, Aroa virus, Kadam virus, Gadgets Gully |
| | | virus, Langat virus, Louping ill virus, Koutango |
| | | virus, Alfuy virus, Usutu virus, Stratford virus, |
| | | Kokobera virus, Cacipacoré virus, Yaoundé virus, |
| | | Tembusu virus, Ntaya virus, Bagaza virus, Ilhéus |
| | | virus, Sepik virus, Wesselsbron virus, Kédougou |
| | | virus, Banzi virus, Bouboui virus, Edge Hill virus, |
| | | Jugra virus, Potiskum virus, Saboya virus, Ugando |
| | | S virus |
| | Hepacivirus | Hepatitis C virus |
| | Pegivirus | Human pegivirus genotype 1, Human pegivirus |
| | | genotype 2, Human pegivirus genotype 3, Human |
| | | pegivirus genotype 4, Human pegivirus genotype |
| | | 5, Human pegivirus genotype 6 |
| Togaviridae | Alphavirus | Aura Virus, Chikungunya virus, Eastern equine |
| | | encephalitis virus, Western equine encephalitis |
| | | virus, Venezuelan equine encephalitis virus, |
| | | Semliki Forest virus, Sindbis virus, Ross River |
| | | virus, Rio Negro virus, Everglades virus, |
| | | Middelburg virus, Barmah Forest virus, Una virus, |
| | | Sagiyama virus, Ndumu virus |
| Matonaviridae | Rubivirus | Rubella virus |
| Retroviridae | Deltaretrovirus | Human T-lymphotropic virus (HTLV) (e.g., |
| | | HTLV1, HTLV2, HTLV3, HTLV4) |
| | Lentivirus | Human immunodeficiency virus (HIV) (e.g., HIV1, |
| | | HIV2) |
| | Spumavirus* | Human foamy virus |

Single-Stranded Positive-Sense Non-Enveloped RNA Viruses

| | | |
|---|---|---|
| Caliciviridae | Norovirus | Norwalk virus, Lordsdale virus, Maryland virus, |
| | | Jena virus, Alphatorn virus |
| | Sapovirus | Sapporo virus, Manchester virus, Bristol virus, |
| | | Cowden I virus, Ehime virus, Nongkhai virus |
| Hepeviridae | Orthohepevirus | Hepatitis E virus |
| Picornaviridae | Aphthovirus | Foot-and-mouth disease virus |
| | Cardiovirus | Scaffold virus |
| | Cosavirus | Cosavirus |
| | Enterovirus | Coxsackievirus, Enterovirus, Rhinovirus, |
| | | Poliovirus |
| | Hepatovirus | Hepatovirus, Hepatitis A |
| | Parechovirus | Parechovirus |

Single-Stranded Negative-Sense Enveloped RNA Viruses

| | | |
|---|---|---|
| Arenaviridae | Mammarenavirus | Lassa virus, Lujo virus, Junín virus, Machupo |
| | | virus, Guanarito virus, Sabiá virus, Chapare virus, |
| | | Flexal virus, lymphocytic choriomeningitis virus |
| Deltavirus | Deltavirus | Hepatitis delta virus |
| Filoviridae | Ebolavirus | Bombali virus, Bundibugyo virus, Reston virus, |
| | | Sudan virus, Taï Forest virus, Ebola virus |
| | Marburgvirus | Marburg virus, Ravn virus |
| Orthomyxoviridae | Influenzavirus A | Influenza A virus (e.g, H1N1, H2N2, H3N2) |
| | Influenzavirus B | Influenza B virus |
| | Influenzavirus C | Influenza C virus |
| | Thogotovirus | Thogoto virus, Dhori virus |
| Nairoviridae | Orthonairovirus | Artashat virus, Chim virus, Crimean-Congo |
| | | Hemorrhagic Fever virus, Dera Ghazi Khan virus, |
| | | Abu Hammad virus, Abu Mina virus, Sapphire II |
| | | virus, Dugbe virus, Estero Real virus, Hazara virus, |
| | | Farallon virus, Hughes virus, Keterah virus |
| Paramyxoviridae | Respirovirus | Human Parainfluenza virus 1, Human |
| | | Parainfluenza virus 3 |
| | Orthorubulavirus | Human Parainfluenza virus 2, Human |
| | | Parainfluenza virus 4, Mumps virus, Alston virus |
| | Henipavirus | Hendravirus, Nipavirus |
| | Orthoavulavirus | Newcastle disease virus |
| | Morbillivirus | Measles virus |
| Peribunyaviridae | Orthobunyavirus | La Crosse virus, Bunyamwera virus, Ngari virus, |
| | | Keystone virus, South River virus, Jerry Slough |
| | | virus, Kaeng Khoi virus, Kairi virus, Leanyer virus, |
| | | Lumbo virus, Madrid virus, Playas virus, Main |
| | | Drain virus, Manzanila virus, Inini virus, Marituba |
| | | virus, Jamestown Canyon virus, Ingwavuma virus, |
| | | Ilesha virus, laco virus, Guaroa virus, Guamá virus, |
| | | Guajará virus, Cát Qu [symbol] virus, Oya virus, Catú |
| | | virus, Enseada virus, Capim virus, California |
| | | encephalitis virus, Cache Valley virus, Bwamba |
| | | virus, Buttonwillow virus, Bushbush virus, Bimti |
| | | virus, Birao virus, Botambi virus, Bozo virus, Batai |
| | | virus, Batama virus, Bellavista virus, Benevides |
| | | virus, Bertioga virus, Anhembi virus, Lukuni virus, |
| | | Aino virus, Akabane virus, Acará virus |
| Pneumoviridae | Metapneumoivirus | Human metapneumovirus |
| | Orthopneumovirus | Human orthopneumovirus, Human respiratory |
| | | syncytial virus |
| Rhabdoviridae | Lyssavirus | Aravan virus, Rabies virus, Mokola virus, Khujand |
| | | virus, Irkut virus, Ikoyama lyssavirus, Duvenhage |
| | | virus |
| | Barhavirus | Bahia Grande virus, Muir Springs virus |
| | Ledantevirus | Le Dantec virus, Nkolbisson virus |
| | Vesiculovirus | Isfahan virus, Piry virus, Vesicular stomatitis virus, |
| | | Chandipura virus, Malpais Spring virus, Maraba |
| | | virus, Morreton virus, Perinet virus, Radi virus, |
| | | Yug Bogdanovac virus |

*Spumaviruses may contain a RNA and/or DNA genome within the virion (see, e.g., Strauss & Strauss, “Chapter 6—Viruses Whose Life Cycle Uses Reverse Transcriptase,” in Viruses and Human Disease (Second Edition), pp. 211-259 (2008), which is hereby incorporated by reference in its entirety).

[0061] In some embodiments, the target viral genome is from a single-stranded DNA virus (e.g., a virus from the family Circoviridae, Parvoviridae, or Redondoviridae). Exemplary single-stranded DNA viruses include, without limitation, those identified in Table 2 below.

TABLE 2
Exemplary Single-Stranded DNA Viruses

| Family | Genus | Exemplary Viruses |
|---|---|---|
| Circoviridae | Circovirus | Human associated circovirus |
| | Cyclovirus | Human associated cyclovirus |
| Parvoviridae | Bocaparvovirus | Human bocavirus |
| | Dependoparvovirus | Adeno-associated virus |
| | Erythroparvovirus | Human parvovirus B19 |
| | Protoparvovirus | Bufavirus 1a, Cutavirus |
| | Tetraparvovirus | Human Parvovirus 4 |
| Redondoviridae | Torbevirus | Human respiratory-associated |
| | | brisavirus, Human lung- |
| | | associated brisavirus, |
| | | Human gut-associated |
| | | brisavirus, Human oral- |
| | | associated brisavirus |

[0062] Thus, in some embodiments, the target viral genome is from a virus selected from the group consisting of an alphacoronavirus, a betacoronavirus, a flavivirus, a hepacivirus, a pegivirus, an alphavirus, a rubivirus, a deltaretrovirus, a lentivirus, a spumavirus, a norovirus, a sapovirus, an orthohepevirus a aphthovirus, a cardiovirus, a cosavirus, an enterovirus, a hepatovirus, a parechovirus, a mammarenavirus, a deltavirus, an ebolavirus, a marburgvirus, an influenzavirus A, an influenzavirus B, an influenzavirus C, a thogotovirus, an orthonairovirus, a respirovirus, an orthorubulavirus, a henipavirus, an orthoavulavirus, a morbillivirus, an orthobunyavirus, an orthobunyavirus, a metapneumoivirus, an orthopneumovirus, a lyssavirus, a barhavirus, a ledantevirus, a vesiculovirus, a circovirus, a cyclovirus, a bocaparvovirus, a dependoparvovirus, an erythroparvovirus, a protoparvovirus, a tetraparvovirus, and/or a torbevirus. For example, the target viral genome may be from a virus selected from the group consisting of Severe Acute Respiratory Syndrome Coronavirus 2 (SARS-CoV-2), Severe Acute Respiratory Syndrome Coronavirus Urbani (SARS-CoV-Urbani), Middle East Respiratory Syndrome Coronavirus (MERS-CoV), Yellow Fever virus, Dengue virus 1, Dengue virus 2, Dengue virus 3, Dengue virus 4, Japanese Encephalitis virus, West Nile virus, Zika virus, Hepatitis C virus, Chikungunya virus, Ross River virus, Sindbis virus, Rubella virus, Norwalk virus, Coxsackievirus, Enterovirus, Rhinovirus, Poliovirus, Ebola virus, Lassa virus, Marburg virus, Hendravirus, Nipavirus, Newcastle disease virus, Parainfluenza virus, Mumps virus, Measles virus, Rabies virus, Human respiratory syncytial virus, Human parvovirus B19, Foot-and-mouth disease virus, Vesicular stomatitis virus, Human Immunodeficiency virus, Influenzavirus, and/or Hepatitis A virus.

[0063] In some embodiments, the target viral genome is from a double-stranded RNA virus (e.g., a virus from the family Picobirnaviridae). The double-stranded RNA virus may be an enveloped or non-enveloped (e.g., a virus from the family Picobirnaviridae) virus. Exemplary double-stranded RNA viruses include, without limitation, those identified in Table 3 below.

[0064] In some embodiments, the target viral genome is from a double-stranded DNA virus (e.g., a virus from the family Papillomaviridae). The double-stranded DNA virus may be an enveloped (e.g., a virus from the family Herpesviridae or Hepadnaviridae) or a non-enveloped (e.g., a virus from the family Papillomaviridae or Polyomaviridae) virus. Exemplary double-stranded DNA viruses include, without limitation, those identified in Table 3 below.

TABLE 3
Exemplary Double-Stranded Viruses

| | | |
|---|---|---|
| Family | Genus/Genera | Exemplary Viruses |

Double-Stranded RNA Viruses

| | | |
|---|---|---|
| Picobirnaviridae | Picobirnavirus | Human picobirnavirus |

Double-Stranded DNA Viruses

| | | |
|---|---|---|
| Papillomaviridae | Alphapapillomavirus | Human papillomavirus (HPV) (e.g., HPV 32, HPV |
| | | 42, HPV 6, HPV 10, HPV 11, HPV 13, HPV 16, |
| | | HPV 160, HPV 94, HPV 125, HPV 117) |
| | Betapapillomavirus | Human papillomavirus (HPV) (e.g, HPV 5, |
| | | HPV8, HPV 93, HPV 98, HPV 99, HPV 105, |
| | | HPV 118) |
| Polyomaviridae | Alphapolyomavirus | Merkel cell polyomavirus (e.g., Human |
| | | polyomavirus 5), Trichodysplasia spinulosa- |
| | | associated polyomavirus, Human polyomavirus 9, |
| | | New Jersey polyomavirus, LI polyomavirus) |
| | Betapolyomavirus | BK polyomavirus, JC polyomavirus, KI |
| | | polyomavirus, WU polyomavirus) |
| | Deltapolyomavirus | human polyomavirus 6, human polyomavirus 7, |
| | | MW polyomavirus, STL polyomavirus |
| Herpesviridae | Cytomegalovirus | Human cytomegalovirus (HCMV, Human |
| | | herpesvirus 5) |
| | Rhadinovirus | Kaposi’s sarcoma-associated herpesvirus (KSHV, |
| | | Human gammaherpesvirus 8, HHV-8) |
| | Roseolovirus | Human herpesvirus 6 (e.g, HHV6A, HHV6A, |
| | | HHV6B), Human herpesvirus 7 (HHV7) |
| | Simplexvirus | Herpes simplex virus (HSV) (e.g., HSV1, HSV2) |
| | Lymphocryptovirus | Epstein-Barr virus (EBV, Human herpesvirus 4, |
| | | HHV4) |
| | Varicellovirus | Human herpesvirus 3 (HHV3, Varicella-zoster |
| | | virus, VZV) |
| Hepadnaviridae* | Orthohepadnavirus | Hepatitis B virus |

*The hepadnavirus genome consists of a partially dsDNA held in a circular conformation by base pairing in a cohesive overlap between the 5′-ends of the two DNA strands (Seeger and Mason, “Molecular Biology of Hepatitis B Virus Infection,” Virology (479-480): 672-686 (2015), which is hereby incorporated by reference in its entirety).

[0065] Thus, in some embodiments, the target viral genome is from a virus selected from the group consisting of a picobirnavirus, an alphapapillomavirus, a betapapillomavirus, an alphapolyomavirus, a betapolyomavirus, a deltapolyomavirus, a cytomegalovirus, a rhadinovirus, a roseolovirus, a simplexvirus, a lymphocryptovirus, a varicellovirus, and/or an orthohepadnavirus. For example, the target viral genome may be from a virus selected from the group consisting of Human papillomavirus, Merkel cell polyomavirus, Hyman cytomegalovirus, Kaposi's sarcoma virus, Human herpesvirus 6, Human herpesvirus 7, Herpes simplex virus, Epstein-Barr virus, Human herpesvirus 3, and/or Hepatitis B virus.

[0066] In one embodiment, the target viral genome is from SARS-CoV-2. SARS-CoV-2 is the positive-sense RNA virus that causes coronavirus disease 2019 (COVID-19). The genomic structure of SARS-CoV-2 is characteristic of other known coronaviruses. In particular, more than two-thirds of the genome comprises the ORF lab region (comprising ORF1a and ORF1b), which is located at the 5′ end of the genome and encodes ORF1ab polyproteins. The remaining one third of the genome, located 3′ to the ORF1ab region, consists of genes encoding structural proteins including surface (S), envelope (E), membrane (M), and nucleocapsid (N) proteins. Additionally, the SARS-CoV-2 contains six accessory proteins, encoded by ORF3a, ORF6, ORF7a, ORF7b, and ORF8 regions. (Khailany et al., “Genomic characterization of a novel SARS-CoV-2,” Gene Rep. Apr. 16, 2020, which is hereby incorporated by reference in its entirety.)

[0067] The first sequence of the SARS-CoV-2 genome isolated from Wuhan was deposited as NCBI Reference Sequence No. NC_045512.2 and GenBank Ref. No. MN908947, which are hereby incorporated by reference in their entirety (see Table 9). Thus, in some embodiments, the target viral genome has the sequence corresponding to that of SEQ ID NO: 1, which is shown in Table 9 (Wu et al., “A New Coronavirus Associated with Human Respiratory Disease in China,” Nature 579(7798):265-269 (2020), which are hereby incorporated by reference in its entirety). It will be understood that RNA sequences provided herein, referenced herein, or reported in public databases, e.g., GenBank, will list or report thymine (i.e., T) rather than uracil (i.e., U), which is based on RNA sequencing techniques that involve sequencing of, e.g., cDNA. Thus, it will be understood that any RNA genome sequence (or portion thereof) provided herein or reported in referenced public databases is contemplated as possessing uracil(s) in place of the identified thymine(s).

[0068] The primers (or ID-Oligos) described herein may be directed to any portion of the target viral genome or a fragment thereof. For instance, the primer or multiple primers (or ID-Oligos) described herein may be directed to one or more of the nucleic acid sequences encoding structural proteins including surface protein, envelope protein, membrane protein, and nucleocapsid protein, and/or the six accessory proteins, encoded by ORF3a, ORF6, ORF7a, ORF7b and ORF8 regions of a SARS-CoV-2 target viral genome. For example, the primers (or ID-Oligos) described herein may be directed to a portion of the SARS-CoV-2 target viral genome of SEQ ID NO:1 (or a variant thereof) encoding a structural protein such as surface protein (e.g., nucleic acid residues 21,563-25,384 of SEQ ID NO:1), envelope protein (e.g., nucleic acid residues 26,245-26,472 of SEQ ID NO:1), membrane protein (e.g., nucleic acid residues 26,523-27,191 of SEQ ID NO:1), and nucleocapsid protein (e.g., nucleic acid residues 28,274-29,533 of SEQ ID NO:1), and/or one or more of the six accessory proteins, encoded by ORF3a (e.g., nucleic acid residues 25,393-26,220 of SEQ ID NO:1), ORF6 (e.g., nucleic acid residues 27,202-27,387 of SEQ ID NO:1), ORF7a (e.g., nucleic acid residues 27,394-27,759 of SEQ ID NO:1), ORF7b (e.g., nucleic acid residues 27,756-27,887 of SEQ ID NO:1), and ORF8 regions (e.g., nucleic acid residues 27,894-28,259 of SEQ ID NO:1).

[0069] The encoded proteins for the SARS-CoV-2 target viral genome of SEQ ID NO:1 are also identified in Table 4 below.

TABLE 4
Exemplary SARS-Cov-2 Protein Sequences (GenBank Ref. No. MN908947, which is
hereby incorporated by reference in its entirety)

| | | SEQ |
|---|---|---|
| Protein Name | Amino Acid Sequence | ID NO: |
| Spike Protein | MFVFLVLLPLVSSQCVNLTTRTQLPPAYTNSFTRGVYYPDKVFR | 280 |
| | SSVLHSTQDLFLPFFSNVTWFHAIHVSGTNGTKRFDNPVLPFND | |
| | GVYFASTEKSNIIRGWIFGTTLDSKTQSLLIVNNATNVVIKVCE | |
| | FQFCNDPFLGVYYHKNNKSWMESEFRVYSSANNCTFEYVSQPFL | |
| | MDLEGKQGNFKNLREFVFKNIDGYFKIYSKHTPINLVRDLPQGF | |
| | SALEPLVDLPIGINITRFQTLLALHRSYLTPGDSSSGWTAGAAA | |
| | YYVGYLQPRTFLLKYNENGTITDAVDCALDPLSETKCTLKSFTV | |
| | EKGIYQTSNFRVQPTESIVRFPNITNLCPFGEVFNATRFASVYA | |
| | WNRKRISNCVADYSVLYNSASFSTFKCYGVSPTKLNDLCFTNVY | |
| | ADSFVIRGDEVRQIAPGQTGKIADYNYKLPDDFTGCVIAWNSNN | |
| | LDSKVGGNYNYLYRLFRKSNLKPFERDISTEIYQAGSTPCNGVE | |
| | GFNCYFPLQSYGFQPTNGVGYQPYRVVVLSFELLHAPATVCGPK | |
| | KSTNLVKNKCVNFNFNGLTGTGVLTESNKKFLPFQQFGRDIADT | |
| | TDAVRDPQTLEILDITPCSFGGVSVITPGTNTSNQVAVLYQDVN | |
| | CTEVPVAIHADQLTPTWRVYSTGSNVFQTRAGCLIGAEHVNNSY | |
| | ECDIPIGAGICASYQTQTNSPRRARSVASQSIIAYTMSLGAENS | |
| | VAYSNNSIAIPTNFTISVTTEILPVSMTKTSVDCTMYICGDSTE | |
| | CSNLLLQYGSFCTQLNRALTGIAVEQDKNTQEVFAQVKQIYKTP | |
| | PIKDFGGFNFSQILPDPSKPSKRSFIEDLLFNKVTLADAGFIKQ | |
| | YGDCLGDIAARDLICAQKFNGLTVLPPLLTDEMIAQYTSALLAG | |
| | TITSGWTFGAGAALQIPFAMQMAYRFNGIGVTQNVLYENQKLIA | |
| | NQFNSAIGKIQDSLSSTASALGKLQDVVNQNAQALNTLVKQLSS | |
| | NFGAISSVLNDILSRLDKVEAEVQIDRLITGRLQSLQTYVTQQL | |
| | IRAAEIRASANLAATKMSECVLGQSKRVDFCGKGYHLMSFPQSA | |
| | PHGVVFLHVTYVPAQEKNFTTAPAICHDGKAHFPREGVFVSNGT | |
| | HWFVTQRNFYEPQIITTDNTFVSGNCDVVIGIVNNTVYDPLQPE | |
| | LDSFKEELDKYFKNHTSPDVDLGDISGINASVVNIQKEIDRLNE | |
| | VAKNLNESLIDLQELGKYEQYIKWPWYIWLGFIAGLIAIVMVTI | |
| | MLCCMTSCCSCLKGCCSCGSCCKFDEDDSEPVLKGVKLHYT | |
| Nucleocapsid | MSDNGPQNQRNAPRITFGGPSDSTGSNQNGERSGARSKQRRPQG | 281 |
| Protein | LPNNTASWFTALTQHGKEDLKFPRGQGVPINTNSSPDDQIGYYR | |
| | RATRRIRGGDGKMKDLSPRWYFYYLGTGPEAGLPYGANKDGIIW | |
| | VATEGALNTPKDHIGTRNPANNAAIVLQLPQGTTLPKGFYAEGS | |
| | RGGSQASSRSSSRSRNSSRNSTPGSSRGTSPARMAGNGGDAALA | |
| | LLLLDRLNQLESKMSGKGQQQQGQTVTKKSAAEASKKPRQKRTA | |
| | TKAYNVTQAFGRRGPEQTQGNFGDQELIRQGTDYKHWPQIAQFA | |
| | PSASAFFGMSRIGMEVTPSGTWLTYTGAIKLDDKDPNFKDQVIL | |
| | LNKHIDAYKTFPPTEPKKDKKKKADETQALPQRQKKQQTVTLLP | |
| | AADLDDFSKQLQQSMSSADSTQA | |
| Envelope | MYSFVSEETGTLIVNSVLLFLAFVVFLLVTLAILTALRLCAYCC | 282 |
| Protein | NIVNVSLVKPSFYVYSRVKNLNSSRVPDLLV | |
| Membrane | MADSNGTITVEELKKLLEQWNLVIGFLFLTWICLLQFAYANRNR | 283 |
| Protein | FLYIIKLIFLWLLWPVTLACFVLAAVYRINWITGGIAIAMACLV | |
| | GLMWLSYFIASFRLFARTRSMWSFNPETNILLNVPLHGTILTRP | |
| | LLESELVIGAVILRGHLRIAGHHLGRCDIKDLPKEITVATSRTL | |
| | SYYKLGASQRVAGDSGFAAYSRYRIGNYKLNTDHSSSSDNIALL | |
| | VQ | |
| ORF lab | MESLVPGFNEKTHVQLSLPVLQVRDVLVRGFGDSVEEVLSEARQ | 284 |
| Polyprotein | HLKDGTCGLVEVEKGVLPQLEQPYVFIKRSDARTAPHGHVMVEL | |
| | VAELEGIQYGRSGETLGVLVPHVGEIPVAYRKVLLRKNGNKGAG | |
| | GHSYGADLKSFDLGDELGTDPYEDFQENWNTKHSSGVTRELMRE | |
| | LNGGAYTRYVDNNFCGPDGYPLECIKDLLARAGKASCTLSEQLD | |
| | FIDTKRGVYCCREHEHEIAWYTERSEKSYELQTPFEIKLAKKFD | |
| | TFNGECPNFVFPLNSIIKTIQPRVEKKKLDGFMGRIRSVYPVAS | |
| | PNECNQMCLSTLMKCDHCGETSWQTGDFVKATCEFCGTENLTKE | |
| | GATTCGYLPQNAVVKIYCPACHNSEVGPEHSLAEYHNESGLKTI | |
| | LRKGGRTIAFGGCVFSYVGCHNKCAYWVPRASANIGCNHTGVVG | |
| | EGSEGLNDNLLEILQKEKVNINIVGDFKLNEEIAIILASESAST | |
| | SAFVETVKGLDYKAFKQIVESCGNFKVTKGKAKKGAWNIGEQKS | |
| | ILSPLYAFASEAARVVRSIFSRTLETAQNSVRVLQKAAITILDG | |
| | ISQYSLRLIDAMMFTSDLATNNLVVMAYITGGVVQLTSQWLTNI | |
| | FGTVYEKLKPVLDWLEEKFKEGVEFLRDGWEIVKEISTCAGEIV | |
| | GGQIVTCAKEIKESVQTFFKLVNKFLALCADSIIIGGAKLKALN | |
| | LGETFVTHSKGLYRKCVKSREETGLLMPLKAPKEIIFLEGETLP | |
| | TEVLTEEVVLKTGDLQPLEQPTSEAVEAPLVGTPVCINGLMLLE | |
| | IKDTEKYCALAPNMMVTNNTFTLKGGAPTKVTFGDDTVIEVQGY | |
| | KSVNITFELDERIDKVLNEKCSAYTVELGTEVNEFACVVADAVI | |
| | KTLQPVSELLTPLGIDLDEWSMATYYLFDESGEFKLASHMYCSF | |
| | YPPDEDEEEGDCEEEEFEPSTQYEYGTEDDYQGKPLEFGATSAA | |
| | LQPEEEQEEDWLDDDSQQTVGQQDGSEDNQTTTIQTIVEVQPQL | |
| | EMELTPVVQTIEVNSFSGYLKLTDNVYIKNADIVEEAKKVKPTV | |
| | VVNAANVYLKHGGGVAGALNKATNNAMQVESDDYIATNGPLKVG | |
| | GSCVLSGHNLAKHCLHVVGPNVNKGEDIQLLKSAYENFNQHEVL | |
| | LAPLLSAGIFGADPIHSLRVCVDTVRTNVYLAVFDKNLYDKLVS | |
| | SFLEMKSEKQVEQKIAEIPKEEVKPFITESKPSVEQRKQDDKKI | |
| | KACVEEVTTTLEETKFLTENLLLYIDINGNLHPDSATLVSDIDI | |
| | TFLKKDAPYIVGDVVQEGVLTAVVIPTKKAGGTTEMLAKALRKV | |
| | PTDNYITTYPGQGLNGYTVEEAKTVLKKCKSAFYILPSIISNEK | |
| | QEILGTVSWNLREMLAHAEETRKLMPVCVETKAIVSTIQRKYKG | |
| | IKIQEGVVDYGARFYFYTSKTTVASLINTLNDLNETLVTMPLGY | |
| | VTHGLNLEEAARYMRSLKVPATVSVSSPDAVTAYNGYLTSSSKT | |
| | PEEHFIETISLAGSYKDWSYSGQSTQLGIEFLKRGDKSVYYTSN | |
| | PTTFHLDGEVITFDNLKTLLSLREVRTIKVFTTVDNINLHTQVV | |
| | DMSMTYGQQFGPTYLDGADVTKIKPHNSHEGKTFYVLPNDDTLR | |
| | VEAFEYYHTTDPSFLGRYMSALNHTKKWKYPQVNGLTSIKWADN | |
| | NCYLATALLTLQQIELKFNPPALQDAYYRARAGEAANFCALILA | |
| | YCNKTVGELGDVRETMSYLFQHANLDSCKRVLNVVCKTCGQQQT | |
| | TLKGVEAVMYMGTLSYEQFKKGVQIPCTCGKQATKYLVQQESPF | |
| | VMMSAPPAQYELKHGTFTCASEYTGNYQCGHYKHITSKETLYCI | |
| | DGALLTKSSEYKGPITDVFYKENSYTTTIKPVTYKLDGVVCTEI | |
| | DPKLDNYYKKDNSYFTEQPIDLVPNQPYPNASFDNFKFVCDNIK | |
| | FADDLNQLTGYKKPASRELKVTFFPDLNGDVVAIDYKHYTPSFK | |
| | KGAKLLHKPIVWHVNNATNKATYKPNTWCIRCLWSTKPVETSNS | |
| | FDVLKSEDAQGMDNLACEDLKPVSEEVVENPTIQKDVLECNVKT | |
| | TEVVGDIILKPANNSLKITEEVGHTDLMAAYVDNSSLTIKKPNE | |
| | LSRVLGLKTLATHGLAAVNSVPWDTIANYAKPFLNKVVSTTTNI | |
| | VTRCLNRVCTNYMPYFFTLLLQLCTFTRSTNSRIKASMPTTIAK | |
| | NTVKSVGKFCLEASFNYLKSPNFSKLINIIIWFLLLSVCLGSLI | |
| | YSTAALGVLMSNLGMPSYCTGYREGYLNSTNVTIATYCTGSIPC | |
| | SVCLSGLDSLDTYPSLETIQITISSFKWDLTAFGLVAEWFLAYI | |
| | LFTRFFYVLGLAAIMQLFFSYFAVHFISNSWLMWLIINLVQMAP | |
| | ISAMVRMYIFFASFYYVWKSYVHVVDGCNSSTCMMCYKRNRATR | |
| | VECTTIVNGVRRSFYVYANGGKGFCKLHNWNCVNCDTFCAGSTF | |
| | ISDEVARDLSLQFKRPINPTDQSSYIVDSVTVKNGSIHLYFDKA | |
| | GQKTYERHSLSHFVNLDNLRANNTKGSLPINVIVFDGKSKCEES | |
| | SAKSASVYYSQLMCQPILLLDQALVSDVGDSAEVAVKMFDAYVN | |
| | TFSSTFNVPMEKLKTLVATAEAELAKNVSLDNVLSTFISAARQG | |
| | FVDSDVETKDVVECLKLSHQSDIEVTGDSCNNYMLTYNKVENMT | |
| | PRDLGACIDCSARHINAQVAKSHNIALIWNVKDFMSLSEQLRKQ | |
| | IRSAAKKNNLPFKLTCATTRQVVNVVTTKIALKGGKIVNNWLKQ | |
| | LIKVTLVFLFVAAIFYLITPVHVMSKHTDFSSEIIGYKAIDGGV | |
| | TRDIASTDTCFANKHADFDTWFSQRGGSYTNDKACPLIAAVITR | |
| | EVGFVVPGLPGTILRTTNGDFLHFLPRVFSAVGNICYTPSKLIE | |
| | YTDFATSACVLAAECTIFKDASGKPVPYCYDTNVLEGSVAYESL | |
| | RPDTRYVLMDGSIIQFPNTYLEGSVRVVTTFDSEYCRHGTCERS | |
| | EAGVCVSTSGRWVLNNDYYRSLPGVFCGVDAVNLLTNMFTPLIQ | |
| | PIGALDISASIVAGGIVAIVVTCLAYYFMRFRRAFGEYSHVVAF | |
| | NTLLFLMSFTVLCLTPVYSFLPGVYSVIYLYLTFYLTNDVSFLA | |
| | HIQWMVMFTPLVPFWITIAYIICISTKHFYWFFSNYLKRRVVFN | |
| | GVSFSTFEEAALCTFLLNKEMYLKLRSDVLLPLTQYNRYLALYN | |
| | KYKYFSGAMDTTSYREAACCHLAKALNDFSNSGSDVLYQPPQTS | |
| | ITSAVLQSGFRKMAFPSGKVEGCMVQVTCGTTTLNGLWLDDVVY | |
| | CPRHVICTSEDMLNPNYEDLLIRKSNHNFLVQAGNVQLRVIGHS | |
| | MQNCVLKLKVDTANPKTPKYKFVRIQPGQTFSVLACYNGSPSGV | |
| | YQCAMRPNFTIKGSFLNGSCGSVGFNIDYDCVSFCYMHHMELPT | |
| | GVHAGTDLEGNFYGPFVDRQTAQAAGTDTTITVNVLAWLYAAVI | |
| | NGDRWFLNRFTTTLNDFNLVAMKYNYEPLTQDHVDILGPLSAQT | |
| | GIAVLDMCASLKELLQNGMNGRTILGSALLEDEFTPFDVVRQCS | |
| | GVTFQSAVKRTIKGTHHWLLLTILTSLLVLVQSTQWSLFFFLYE | |
| | NAFLPFAMGIIAMSAFAMMFVKHKHAFLCLFLLPSLATVAYFNM | |
| | VYMPASWVMRIMTWLDMVDTSLSGFKLKDCVMYASAVVLLILMT | |
| | ARTVYDDGARRVWTLMNVLTLVYKVYYGNALDQAISMWALIISV | |
| | TSNYSGVVTTVMFLARGIVFMCVEYCPIFFITGNTLQCIMLVYC | |
| | FLGYFCTCYFGLFCLLNRYFRLTLGVYDYLVSTQEFRYMNSQGL | |
| | LPPKNSIDAFKLNIKLLGVGGKPCIKVATVQSKMSDVKCTSVVL | |
| | LSVLQQLRVESSSKLWAQCVQLHNDILLAKDTTEAFEKMVSLLS | |
| | VLLSMQGAVDINKLCEEMLDNRATLQAIASEFSSLPSYAAFATA | |
| | QEAYEQAVANGDSEVVLKKLKKSLNVAKSEFDRDAAMQRKLEKM | |
| | ADQAMTQMYKQARSEDKRAKVTSAMQTMLFTMLRKLDNDALNNI | |
| | INNARDGCVPLNIIPLTTAAKLMVVIPDYNTYKNTCDGTTFTYA | |
| | SALWEIQQVVDADSKIVQLSEISMDNSPNLAWPLIVTALRANSA | |
| | VKLQNNELSPVALRQMSCAAGTTQTACTDDNALAYYNTTKGGRF | |
| | VLALLSDLQDLKWARFPKSDGTGTIYTELEPPCRFVTDTPKGPK | |
| | VKYLYFIKGLNNLNRGMVLGSLAATVRLQAGNATEVPANSTVLS | |
| | FCAFAVDAAKAYKDYLASGGQPITNCVKMLCTHTGTGQAITVTP | |
| | EANMDQESFGGASCCLYCRCHIDHPNPKGFCDLKGKYVQIPTTC | |
| | ANDPVGFTLKNTVCTVCGMWKGYGCSCDQLREPMLQSADAQSFL | |
| | NRVCGVSAARLTPCGTGTSTDVVYRAFDIYNDKVAGFAKFLKTN | |
| | CCRFQEKDEDDNLIDSYFVVKRHTFSNYQHEETIYNLLKDCPAV | |
| | AKHDFFKFRIDGDMVPHISRQRLTKYTMADLVYALRHFDEGNCD | |
| | TLKEILVTYNCCDDDYFNKKDWYDFVENPDILRVYANLGERVRQ | |
| | ALLKTVQFCDAMRNAGIVGVLTLDNQDLNGNWYDFGDFIQTTPG | |
| | SGVPVVDSYYSLLMPILTLTRALTAESHVDTDLTKPYIKWDLLK | |
| | YDFTEERLKLFDRYFKYWDQTYHPNCVNCLDDRCILHCANFNVL | |
| | FSTVFPPTSFGPLVRKIFVDGVPFVVSTGYHFRELGVVHNQDVN | |
| | LHSSRLSFKELLVYAADPAMHAASGNLLLDKRTTCFSVAALTNN | |
| | VAFQTVKPGNFNKDFYDFAVSKGFFKEGSSVELKHFFFAQDGNA | |
| | AISDYDYYRYNLPTMCDIRQLLFVVEVVDKYFDCYDGGCINANQ | |
| | VIVNNLDKSAGFPFNKWGKARLYYDSMSYEDQDALFAYTKRNVI | |
| | PTITQMNLKYAISAKNRARTVAGVSICSTMTNRQFHQKLLKSIA | |
| | ATRGATVVIGTSKFYGGWHNMLKTVYSDVENPHLMGWDYPKCDR | |
| | AMPNMLRIMASLVLARKHTTCCSLSHRFYRLANECAQVLSEMVM | |
| | CGGSLYVKPGGTSSGDATTAYANSVFNICQAVTANVNALLSTDG | |
| | NKIADKYVRNLQHRLYECLYRNRDVDTDFVNEFYAYLRKHFSMM | |
| | ILSDDAVVCFNSTYASQGLVASIKNFKSVLYYQNNVFMSEAKCW | |
| | TETDLTKGPHEFCSQHTMLVKQGDDYVYLPYPDPSRILGAGCFV | |
| | DDIVKTDGTLMIERFVSLAIDAYPLTKHPNQEYADVFHLYLQYI | |
| | RKLHDELTGHMLDMYSVMLTNDNTSRYWEPEFYEAMYTPHTVLQ | |
| | AVGACVLCNSQTSLRCGACIRRPFLCCKCCYDHVISTSHKLVLS | |
| | VNPYVCNAPGCDVTDVTQLYLGGMSYYCKSHKPPISFPLCANGQ | |
| | VFGLYKNTCVGSDNVTDFNAIATCDWTNAGDYILANTCTERLKL | |
| | FAAETLKATEETFKLSYGIATVREVLSDRELHLSWEVGKPRPPL | |
| | NRNYVFTGYRVTKNSKVQIGEYTFEKGDYGDAVVYRGTTTYKLN | |
| | VGDYFVLTSHTVMPLSAPTLVPQEHYVRITGLYPTLNISDEFSS | |
| | NVANYQKVGMQKYSTLQGPPGTGKSHFAIGLALYYPSARIVYTA | |
| | CSHAAVDALCEKALKYLPIDKCSRIIPARARVECFDKFKVNSTL | |
| | EQYVFCTVNALPETTADIVVFDEISMATNYDLSVVNARLRAKHY | |
| | VYIGDPAQLPAPRTLLTKGTLEPEYFNSVCRLMKTIGPDMFLGT | |
| | CRRCPAEIVDTVSALVYDNKLKAHKDKSAQCFKMFYKGVITHDV | |
| | SSAINRPQIGVVREFLTRNPAWRKAVFISPYNSQNAVASKILGL | |
| | PTQTVDSSQGSEYDYVIFTQTTETAHSCNVNRFNVAITRAKVGI | |
| | LCIMSDRDLYDKLQFTSLEIPRRNVATLQAENVTGLFKDCSKVI | |
| | TGLHPTQAPTHLSVDTKFKTEGLCVDIPGIPKDMTYRRLISMMG | |
| | FKMNYQVNGYPNMFITREEAIRHVRAWIGEDVEGCHATREAVGT | |
| | NLPLQLGFSTGVNLVAVPTGYVDTPNNTDFSRVSAKPPPGDQFK | |
| | HLIPLMYKGLPWNVVRIKIVQMLSDTLKNLSDRVVFVLWAHGFE | |
| | LTSMKYFVKIGPERTCCLCDRRATCFSTASDTYACWHHSIGFDY | |
| | VYNPFMIDVQQWGFTGNLQSNHDLYCQVHGNAHVASCDAIMTRC | |
| | LAVHECFVKRVDWTIEYPIIGDELKINAACRKVQHMVVKAALLA | |
| | DKFPVLHDIGNPKAIKCVPQADVEWKFYDAQPCSDKAYKIEELF | |
| | YSYATHSDKFTDGVCLFWNCNVDRYPANSIVCRFDTRVLSNLNL | |
| | PGCDGGSLYVNKHAFHTPAFDKSAFVNLKQLPFFYYSDSPCESH | |
| | GKQVVSDIDYVPLKSATCITRCNLGGAVCRHHANEYRLYLDAYN | |
| | MMISAGFSLWVYKQFDTYNLWNTFTRLQSLENVAFNVVNKGHFD | |
| | GQQGEVPVSIINNTVYTKVDGVDVELFENKTTLPVNVAFELWAK | |
| | RNIKPVPEVKILNNLGVDIAANTVIWDYKRDAPAHISTIGVCSM | |
| | TDIAKKPTETICAPLTVFFDGRVDGQVDLFRNARNGVLITEGSV | |
| | KGLQPSVGPKQASLNGVTLIGEAVKTQFNYYKKVDGVVQQLPET | |
| | YFTQSRNLQEFKPRSQMEIDFLELAMDEFIERYKLEGYAFEHIV | |
| | YGDFSHSQLGGLHLLIGLAKRFKESPFELEDFIPMDSTVKNYFI | |
| | TDAQTGSSKCVCSVIDLLLDDFVEIIKSQDLSVVSKVVKVTIDY | |
| | TEISFMLWCKDGHVETFYPKLQSSQAWQPGVAMPNLYKMQRMLL | |
| | EKCDLQNYGDSATLPKGIMMNVAKYTQLCQYLNTLTLAVPYNMR | |
| | VIHFGAGSDKGVAPGTAVLRQWLPTGTLLVDSDLNDFVSDADST | |
| | LIGDCATVHTANKWDLIISDMYDPKTKNVTKENDSKEGFFTYIC | |
| | GFIQQKLALGGSVAIKITEHSWNADLYKLMGHFAWWTAFVTNVN | |
| | ASSSEAFLIGCNYLGKPREQIDGYVMHANYIFWRNTNPIQLSSY | |
| | SLFDMSKFPLKLRGTAVMSLKEGQINDMILSLLSKGRLIIRENN | |
| | RVVISSDVLVNN | |
| ORF3a | MDLFMRIFTIGTVTLKQGEIKDATPSDFVRATATIPIQASLPFG | 285 |
| | WLIVGVALLAVFQSASKIITLKKRWQLALSKGVHFVCNLLLLFV | |
| | TVYSHLLLVAAGLEAPFLYLYALVYFLQSINFVRIIMRLWLCWK | |
| | CRSKNPLLYDANYFLCWHTNCYDYCIPYNSVTSSIVITSGDGTT | |
| | SPISEHDYQIGGYTEKWESGVKDCVVLHSYFTSDYYQLYSTQLS | |
| | TDTGVEHVTFFIYNKIVDEPEEHVQIHTIDGSSGVVNPVMEPIY | |
| | DEPTTTTSVPL | |
| ORF6 | MFHLVDFQVTIAEILLIIMRTFKVSIWNLDYIINLIIKNLSKSL | 286 |
| | TENKYSQLDEEQPMEID | |
| ORF7a | MKIILFLALITLATCELYHYQECVRGTTVLLKEPCSSGTYEGNS | 287 |
| | PFHPLADNKFALTCFSTQFAFACPDGVKHVYQLRARSVSPKLFI | |
| | RQEEVQELYSPIFLIVAAIVFITLCFTLKRKTE | |
| ORF8 | MKFLVFLGIITTVAAFHQECSLQSCTQHQPYVVDDPCPIHFYSK | 288 |
| | WYIRVGARKSAPLIELCVDEAGSKSPIQYIDIGNYTVSCLPFTI | |
| | NCQEPKLGSLVVRCSFYEDFLEYHDVRVVLDFI | |
| ORF10 | MGYINVFAFPFTIYSLLLCRMNSRNYIAQVDVVNFNLT | 289 |

[0070] In certain examples herein, the primers (or ID-Oligos) described herein were identified and designed based on the SARS-CoV-Urbani virus (GenBank Accession No. AY278741.1 (SEQ ID NO: 2), which is hereby incorporated by reference in its entirety), but it will be readily understood that embodiments described herein are not limited to this isolate and encompass detection of other isolates and variants of other coronaviruses. Table 5 identifies suitable coronavirus sequences for use in accordance with embodiments of the present disclosure (see also sequence information in Table 9).

TABLE 5
Exemplary Coronavirus Genome Sequences

| | GenBank | | |
|---|---|---|---|
| | Accession | SEQ | |
| Coronavirus Name | No.* | ID No. | Description |
| Severe acute respiratory syndrome | NC_045512.2 | 1 | Complete genome; 29,903 bp |
| coronavirus 2 isolate Wuhan-Hu-1 | | | ss-RNA (18-JUL.-2020) |
| SARS coronavirus Urbani | AY278741.1 | 2 | Complete genome; 29,727 bp |
| | | | RNA (25-JUL.-2016) |
| Betacoronavirus England 1 isolate | NC_038294.1 | 3 | Complete genome; 30,111 bp |
| H123990006 | | | RNA linear (22-NOV.-2020) |
| Middle East Respiratory | KX154693.1 | 4 | Complete genome; 30,096 bp |
| Syndrome Coronavirus Isolate | | | RNA linear (30-APR.-2017) |
| Hu/Riyadh-KSA-13127/2016 | | | |
| Severe acute respiratory syndrome | MT263402.1 | 5 | Complete genome; 29,844 bp |
| coronavirus 2 isolate SARS-CoV- | | | RNA (01-OCT.-2020) |
| 2/human/USA/WA-UW322/2020 | | | |
| Human coronavirus HKU1, | NC_006577.2 | 6 | Complete genome; 29,926 bp |
| complete genome | | | ss-RNA (20-NOV.-2020) |
| Human coronavirus OC43 strain | MN306036.1 | 7 | Complete genome; 30,681 bp |
| HCoV_OC43/Seattle/USA/SC0682/ | | | RNA (21-FEB.-2020) |
| 2019 | | | |
| Human coronavirus NL63 strain | MN306018.1 | 8 | Complete genome; 27,484 bp |
| HCoV_NL63/Seattle/USA/SCO179/ | | | RNA (21-FEB.-2020) |
| 2018 | | | |
| Human coronavirus 229E strain | MN369046.1 | 9 | Complete genome; 27,075 bp |
| HCoV_229E/Seattle/USA/SC9724/ | | | RNA (21-FEB.-2020) |
| 2018 | | | |

*Each of which is hereby incorporated by reference in its entirety.

[0071] As of January 2021, there were more than 414,575 complete genomic sequences of SARS-CoV-2 that have been shared globally through publicly accessible databases (see Pan American Health Organization/World Health Organization. Occurrence of variants of SARS-CoV-2 in the Americas. 26 Jan. 2021, which is hereby incorporated by reference in its entirety) and the methods disclosed herein are suitable for detecting the presence of each of these genomic sequences in a sample. In some embodiments, the target viral genome is a variant SARS-CoV-2 genome, as compared to a reference sequence (e.g., the reference sequence of SEQ ID NO: 1). In some embodiments, the primers (or ID-Oligos) described herein may be directed to a portion of a variant SARS-CoV-2 target viral genome corresponding to the portions of SEQ ID NO:1 identified herein above as encoding a structural protein such as surface protein (e.g., corresponding to nucleic acid residues 21,563-25,384 of SEQ ID NO:1), envelope protein (e.g., corresponding to nucleic acid residues 26,245-26,472 of SEQ ID NO:1), membrane protein (e.g., corresponding to nucleic acid residues 26,523-27,191 of SEQ ID NO:1), and nucleocapsid protein (e.g., corresponding to nucleic acid residues 28,274-29,533 of SEQ ID NO:1), and/or one or more of the six accessory proteins, encoded by ORF3a (e.g., corresponding to nucleic acid residues 25,393-26,220 of SEQ ID NO:1), ORF6 (e.g., corresponding to nucleic acid residues 27,202-27,387 of SEQ ID NO:1), ORF7a (e.g., corresponding to nucleic acid residues 27,394-27,759 of SEQ ID NO:1), ORF7b (e.g., corresponding to nucleic acid residues 27,756-27,887 of SEQ ID NO:1), and ORF8 regions (e.g., corresponding to nucleic acid residues 27,894-28,259 of SEQ ID NO:1).

[0072] Exemplary SARS-CoV-2 variants are identified in Table 6 below (see also sequence information in Table 9) together with characteristic mutations. As described herein, one or more ID-Oligos may be designed to be complementary to variant-specific regions of the target viral genome and, in certain embodiments, are complementary (or hybridize) to the region of the target viral genome corresponding to (or encoding) the mutations identified in Table 6 below. Such variant-specific regions corresponding to, e.g., the characteristic mutations identified in Table 6 may be determined by examining the corresponding (or encoding) portions of the exemplary accession or GISAID sequences identified in Table 6 or by comparing the characteristic mutation with the corresponding position(s) of the reference sequence (i.e., unmutated, e.g., SEQ ID NO:1 and the corresponding encoded amino acid sequences shown in Table 4) to determine variant-specific sequences that would result in the mutated amino acid identified.

TABLE 6
SARS-CoV-2 Variants*

| Variant Designation | Characteristic Mutations (Protein: Mutation)** |
|---|---|
| B.1.1.7 | ORF1ab: T1001I, A1708D, I2230T, Δ3675-3677 |
| (20I/501Y.V1) | SGF |
| (see, e.g., GenBank Accession Nos. | Spike (S): Δ69-70 HV, A144 Y, N501Y, A570D, |
| MW735442.1 (SEQ ID NO: 290), | D614G, P681H, T761I, S982A, D1118H |
| MW692118.1 (SEQ ID NO: 291), | ORF8: Q27stop, R52I, Y73C |
| MW531680.1 (SEQ ID NO: 292)***) | Nucleocapsid (N): D3L, S235F |
| B.1.351 (20H/501Y.V2) | ORF1ab: K1655N |
| (see, e.g., GISAID number | Envelope (E): P71L |
| EPL_ISL_6785974***) | Nucleocapsid (N): T205I |
| | Spike (S): K417N, E484K, N501Y, D614G, A701V |
| P.1 | ORF1ab: F681L, I760T, S1188L, K1795Q, Δ3675- |
| (20J/501Y.V3)(see, e.g., GenBank | 3677 SGF, E5662D |
| Accession No. MW642250 (SEQ ID | Spike (S): L18F, T20N, P26S, D138Y, R190S, |
| NO: 293)***) | K417T, E484K, N501Y, D614G, H655Y, T1027I |
| | ORF3a: C174G |
| | ORF8: E92K |
| | ORF9: Q77E |
| | ORF14: V49L |
| | Nucleocapsid (N): P80R |
| B.1.526 (see, e.g., GISAID number | Spike: (L5F*), T95I, D253G, (S477N*), (E484K*), |
| EPL_ISL_962493***) | D614G, (A701V*) |
| | ORF1a: L3201P, T265I, Δ3675/3677 |
| | ORF1b: P314L, Q1011H |
| | ORF3a: P42L, Q57H |
| | ORF8: T11I, |
| | 5′UTR: R81C |
| P.2 | Spike: E484K, D614G, V1176F |
| | ORF1a: L3468V, L3930F |
| | ORF1b: P314L |
| | N: A119S, R203K, G204R, M234I, |
| | 5′UTR: R81C |
| B.1.427 | Spike: L452R, D614G |
| B.1.429 (see, e.g., GISAID number | Spike: S13I, W152C, L452R, D614G |
| EPI_ISL_847590***) | |

*See, e.g. Centers for Disease Control and Prevention, Galloway et al., “Emergence of SARS-CoV-2 B.1.1.7 Lineage - United States, Dec. 29, 2020 - Jan. 12, 2021,” Morbidity and Mortality Report 70(3): 95-99 (2021), which is hereby incorporated by reference in its entirety). **CDC, Scientific Brief on Emerging Variants. Each sequence identified is hereby incorporated by reference in its entirety. *** Each GenBank Accession No. or GISAID reference no. is hereby incorporated by reference in its entirety (see also Table 9).

[0073] In some embodiments, the target viral genome is from Zika virus. Zika infection in humans was first identified in Uganda and the United Republic of Tanzania in 1952, and human Zika infections have been sporadically detected in Africa and Asia for >50 years since the initial isolation (Kawai et al., “Increased Growth Ability and Pathogenicity of American and Pacific-Subtype Zika Virus (ZIKV) Strains Compared with a Southeast Asian-Subtype ZIKV Strain,” PLoS 13(6):e0007387 (2019), which is hereby incorporated by reference in its entirety). The clinical symptoms caused by Zika infection are generally self-limiting and include fever, rash, headache, joint and muscle pain, and conjunctivitis. Approximately 60-70% and 90% of symptomatic Zika-infected patients develop fever and rash, respectively.

[0074] The Zika genome is comprised of a single-stranded, positive-sense RNA that encodes three structural proteins (C, prM, and E) and seven non-structural proteins (NS1, NS2A, NS2B, NS3, NS4A, NS4B, and NS5) in one open reading frame. Zika is classified into two lineages, African and Asian/American. Phylogenetic analyses performed using complete Zika genomes indicate that ZIKV strains in the Asian/American lineage can be divided into three subtypes, American, Pacific, and Southeast Asian, which present several differences in their amino acid sequences. In some embodiments, the at least partially single-stranded viral genome is a Zika virus genome having one of the sequences identified in Table 7 below (see also sequence information in Table 9).

TABLE 7
Exemplary Zika Genome Sequences

| | GenBank | SEQ ID | |
|---|---|---|---|
| Zika Virus Name | Accession No.* | No. | Description |
| Zika virus isolate 1034511 | KX262887.1 | 296 | Complete genome; 10,806 bp |
| | | | RNA (20-MAY 2016) |
| Zika virus | AY632535.2 | 297 | Complete genome; 10,794 bp |
| | | | RNA (01-AUG.-2019) |
| Zika virus strain H/PF/2013 | KJ776791.2 | 298 | Complete genome; 10,807 bp |
| | | | RNA (31-AUG.-2016) |
| Zika virus strain PRVABC- | KX377337.1 | 299 | Complete genome; 10,807 bp |
| 59 | | | RNA (22-JUN.-2016) |
| Zika virus isolate | KY766069.1 | 294 | Complete genome; 11,155 bp |
| Pf13/251013-18 | | | ss-RNA(14-DEC.-2017) |
| Zika virus isolate ZIKV/H. | NC_035889.1/ | 295 | Complete genome; 10,808 bp |
| sapiens/Brazil/Natal/2015 | KU527068.1 | | RNA (24-MAY 2019) |

*Each of which is hereby incorporated by reference in its entirety.

[0075] In some embodiments, the target viral genome is from a Hepatitis C virus. Hepatitis C virus (HCV) infection afflicts more than 170 million people worldwide, with the great majority of patients with acute hepatitis C developing chronic HCV infection. It can ultimately result in liver cirrhosis, hepatic failure or hepatocellular carcinoma, which are responsible for hundreds of thousands of deaths each year. HCV has a narrow host specificity and tissue tropism. HCV is transmitted exclusively through direct blood-to-blood contacts between humans.

[0076] In some embodiments, the target viral genome is a Hepatitis C virus genome having one of the sequences identified in Table 8 below (see also sequence information in Table 9).

TABLE 8
Exemplary HCV Genome Sequences

| | GenBank | SEQ ID | |
|---|---|---|---|
| Coronavirus Name | Accession No.* | No. | Description |
| Hepatitis C virus | AB047639.1 | 300 | Hepatitis C virus (isolate |
| strain JFH-1 | (polyprotein | | JFH-1) genomic RNA, |
| | BAB32872.1) | | complete genome |
| Hepatitis C virus | NC_004102.1 | 301 | Complete genome; |
| genotype 1 | | | 9,646 bp ss-RNA |
| | | | (11 JUL. 2019) |
| Hepatitis C virus | NC_030791.1 | 302 | Complete genome; |
| genotype 7 | | | 9,443 bp RNA |
| | | | (28 MAY 2019) |

*Each of which is hereby incorporated by reference in its entirety.

[0077] A single-stranded template region to the selected portions of the target to which the primer (or ID-Oligo) is complementary (or hybridizes) may be any portion of the target that is of interest for detection according to the methods described herein. In some embodiments, the methods described herein are carried out using one or more oligonucleotide molecules complementary to different portions of the target viral genome (i.e., one or more ID-Oligos, each targeting a different portion of the target viral genome).

[0078] In some embodiments, the one or more ID-Oligos are designed to target portions of the target viral genome that are strain-specific, variant-specific, or/or conserved across all target viral genome strains and variants. As used herein, an ID-Oligo is said to be “specific” for the target viral genome if it can be used in the methods described herein under conditions that permit it to detect the target viral genome without exhibiting cross-reactivity to a single-stranded nucleic acid sequence that is not from the target viral genome (e.g., a non-viral nucleic acid or a nucleic acid from another virus). For example, the one or more ID-Oligos may be designed to target portions of the SARS-CoV-2 genome that are SARS-CoV-specific, SARS-CoV-2 strain-specific (e.g., specific to SARS-CoV-2), SARS-CoV-2 variant-specific, or conserved across all SARS-CoV-2 strains and variants. In accordance with such embodiments, the one or more SARS-CoV-specific ID-Oligos do not cross-react with other at least partially single stranded virus genomes (e.g., Hepatitis C Virus, Zika Virus, Influenza Virus, etc.).

[0079] In some embodiments, the methods described herein are carried out to perform a general screen for the presence of one or more target viral genomes. In accordance with such embodiments, the method includes a population of ID-Oligos (or primers) comprising subpopulations of ID-Oligos, where each sub-population of ID-Oligos is designed to be complementary to a different target viral genome. In one example, a general screen for influenza viruses may be carried out using multiple ID-Oligos (e.g., an array) that would be robust to the rapid evolution of influenza virus strains, due to mutation and reassortment. Similarly, a general screen for HIV could involve multiple ID-Oligos that are robust to the rapid evolution by point mutations and natural selection. In contrast, a number of highly specific ID-Oligos could be chosen to detect a specific strain of influenza that might help pinpoint vaccine priorities or might help identify emergence of drug resistance in strains of HIV.

[0080] In some embodiments, the methods described herein are carried out to perform a general screen for the presence of one or more target viral genomes. In accordance with such embodiments, the method includes providing a population of ID-Oligos comprising subpopulations of ID-Oligos, where each sub-population of ID-Oligos is designed to be complementary to a different portion of one or more target viral genomes.

[0081] Oligonucleotides that are the reverse complement of selected portions of the target are referred to herein as oligonucleotide primers, ID-oligonucleotides, ID-Oligos, or primers. Primers described herein refer to a nucleic acid molecule that hybridizes in a sequence specific manner to a complementary nucleic acid molecule, whereby the primer is capable of extension from its 3′-end through incorporation of dNTPs by a polymerase. The primers of embodiments of the disclosure comprise a nucleotide sequence that is complementary or substantially complementary to a selected portion of a target sequence. The terms “complementary” and “substantially complementary” refer to base pairing between nucleotides such as, for instance, between an oligonucleotide primer and the target or selected portion of the target. Complementary nucleotides are, generally, adenine and thymine, adenine and uracil, and guanine and cytosine. Primers do not require complete complementarity in order to hybridize to their target nucleotide sequence. Primer sequences of the disclosure may be modified to some extent without loss of utility as specific primers. In some embodiments, the primer(s) disclosed herein are at least 80%, at least 85%, at least 90%, at least 91%, at least 92%, at least 93%, at least 94%, at least 95%, at least 96%, at least 97%, at least 98%, at least 99% or 100% complementary to the target sequence or selected portion thereof.

[0082] The oligonucleotide molecule complementary to a selected portion of the target viral genome may be designed by first identifying a target single-stranded region within the viral genome. In some embodiments, the target viral genome is analyzed for areas of secondary structure that might inhibit binding of a complementary oligonucleotide molecule. Accordingly, in some embodiments, the target-single-stranded region within the viral genome does not form secondary-structures that inhibit hybridization of a complementary oligonucleotide. Next, the target at least partially single-stranded viral genome immediately 3′ or 5′ to the identified target single-stranded region (depending whether the target virus has a positive or negative sense genome) is identified and the reverse complement sequences of the virus-specific regions are synthesized as ID-Oligos. Depending on the objectives, ID-Oligos can be designed to hybridize with regions conserved within a family or genus of viruses (e.g., to identify any betacoronavirus, if that is the target) or to one or more regions specific to an individual species of virus (e.g., SARS-CoV), or to one or more regions specific to an individual strain of virus (e.g., SARS-CoV-2), or to one or more regions specific to an individual variant of a strain of virus (e.g., SARS-CoV-2 variant B.1.1.7, SARS-CoV-2 variant B.1.351, SARS-CoV-2 variant P.1, SARS-CoV-2 variant B.1427, SARS-CoV-2 variant B.1.429, SARS-CoV-2 variant B.1.526, SARS-CoV-2 variant B.1.525, and/or SARS-CoV-2 variant P.2). One or more sequences may be selected for use as an ID-Oligo that will hybridize to the target viral genome (e.g., a target at least partially single-stranded RNA genome or a target at least partially single-stranded DNA genome).

[0083] In some embodiments, multiple primers (ID-Oligos) are provided for hybridizing to different complementary portions of one or more target partially single-stranded viral genomes. The multiple portions of the one or more target single-stranded viral genome(s) may be adjacent to regions that are uracil/thymine-free. In some embodiments, all of the different single-stranded template regions are uracil/thymine-free regions. A contemplated method in accordance with such an embodiment is a multiplex assay in which a plurality of ID-Oligos or “primers” are utilized to determine the presence or absence of one or more of a plurality of predetermined target single-stranded viral genome sequences (single-stranded template regions) in a sample. A particularly useful area for such multiplex assays is in screening assays.

[0084] In a multiplexed embodiment of the above method, the sample is admixed with a plurality of different ID-Oligos or “primers”. In this embodiment, the analytical output for a certain result with one of the capture oligonucleotides is distinguishable from the analytical output from the opposite result with all of the primers.

[0085] In accordance with this embodiment, for example, a solid support may contain multiple primers specific for multiple target nucleic acids. Each primer can be localized at defined positions or regions of the solid support, or synthesized on the surface at defined positions or regions of the solid support in situ. Such support facilitates parallel analysis of multiple primer-bound target nucleic acids. Such supports are also appropriate for high throughput screening.

[0086] In some embodiments, the ID-Oligos are analyzed for self-dimerization and/or cross-dimerization. In some embodiments, the ID-Oligos do not self-dimerize and/or cross-dimerize (e.g., with each other). In some embodiments, the guanine/cytosine (G/C) content (as a percent of the total bases of the primer) of the primer sequence is greater than 35%, 40%, 45%, 50%, 55%, or 60% to prevent hairpin formation of the primer. The primer melting temperature (Tm) is the temperature at which one half of the primer-target duplex will dissociate to become single stranded and indicates the duplex stability. In some embodiments, the primer has a melting temperature in the range of 50-65, 50-60, 55-65, or 55-60 degrees Celsius.

[0087] The oligonucleotide primers can be in the form of ribonucleotides, deoxyribonucleotides, modified ribonucleotides, modified deoxyribonucleotides, modified phosphate-sugar-backbone oligonucleotides, nucleotide analogs, and mixtures thereof. In some embodiments, the oligonucleotide primers are single-stranded deoxyribonucleic acid (DNA) molecules. The primers utilized in accordance with any embodiment of the disclosure may be prepared using any suitable method, such as conventional phosphotriester and phosphodiester methods or automated embodiments thereof so long as the primers are capable of hybridizing to their target nucleotide sequences of interest. The primers utilized in the methods described herein to detect the presence or absence of the target sequence are each at least 6 nucleotides in length. In some embodiments, the ID-Oligonucleotide is (or are at least) 6, 7, 8, 9, 10, 11, 12, 13, 14, 15, 16, 17, 18, 19, 20, 21, 22, 23, 24, 25, 26, 27, 28, 29, 30, 31, 32, 33, 34, 35, 36, 37, 38, 39, 40, 41, 42, 43, 44, 45, 46, 47, 48, 49, or 50 nucleotides in length. Where more than one primer is used, each primer may be (or at least), independently, 6, 7, 8, 9, 10, 11, 12, 13, 14, 15, 16, 17, 18, 19, 20, 21, 22, 23, 24, 25, 26, 27, 28, 29, 30, 31, 32, 33, 34, 35, 36, 37, 38, 39, 40, 41, 42, 43, 44, 45, 46, 47, 48, 49, or 50 nucleotides in length. Likewise, where an ID-Oligo (or primer) described herein has a nucleotide sequence that is the reverse complement (or hybridizes) to a portion of a genomic sequence, in some embodiments, the portion is (or is at least) 6, 7, 8, 9, 10, 11, 12, 13, 14, 15, 16, 17, 18, 19, 20, 21, 22, 23, 24, 25, 26, 27, 28, 29, 30, 31, 32, 33, 34, 35, 36, 37, 38, 39, 40, 41, 42, 43, 44, 45, 46, 47, 48, 49, or 50 nucleotides in length.

[0088] In some embodiments, the primer has the sequence of one of SEQ ID NOs:90-169, SEQ ID NOs:251-269, and SEQ ID NOs:273-275, or a fragment thereof at least 6 nucleotides in length. In certain embodiments, the primer has the nucleotide sequence that is at least 80%, at least 85%, at least 86%, at least 87%, at least 88%, at least 89%, at least 90%, at least 91%, at least 92%, at least 93%, at least 94%, at least 95%, at least 96%, at least 97%, at least 98%, or at least 99% identical to the nucleotide sequence of one of SEQ ID NOs: 90-169, SEQ ID NOs:251-269, and SEQ ID NOs:273-275, or a fragment thereof at least 6 nucleotides in length.

[0089] In some embodiments, the ID-Oligo (or primer) has a nucleotide sequence of at least 6 nucleotides in length corresponding to the reverse complement of the SARS-CoV-2 genome of SEQ ID NO:1, which is shown in Table 9 as SEQ ID NO:250.

[0090] In some embodiments, the ID-Oligo (or primer) has a nucleotide sequence that is the reverse complement to a portion of a sequence having at least 80%, at least 85%, at least 86%, at least 87%, at least 88%, at least 89%, at least 90%, at least 91%, at least 92%, at least 93%, at least 94%, at least 95%, at least 96%, at least 97%, at least 98%, at least 99%, or 100% sequence identity to any one of the target viral genome sequences identified herein. In some embodiments, the ID-Oligo (or primer) has a nucleotide sequence that is the reverse complement to a portion of a genomic sequence having at least 80%, at least 85%, at least 86%, at least 87%, at least 88%, at least 89%, at least 90%, at least 91%, at least 92%, at least 93%, at least 94%, at least 95%, at least 96%, at least 97%, at least 98%, at least 99%, or 100% sequence identity to any one of SEQ ID NOs:1-9, as identified in Table 5 above.

[0091] In some embodiments, the primer has a nucleotide sequence that is the reverse complement to a portion of the SARS-CoV-2 reference sequence (i.e., SEQ ID NO:1, Table 5). In some embodiments, the primer has a nucleotide sequence that is the reverse complement to a portion of a variant genomic sequence having at least 80%, at least 85%, at least 86%, at least 87%, at least 88%, at least 89%, at least 90%, at least 91%, at least 92%, at least 93%, at least 94%, at least 95%, at least 96%, at least 97%, at least 98%, at least 99% sequence identity to the SARS-CoV-2 reference sequence (i.e., SEQ ID NO:1, Table 5). In some embodiments, the primer described herein is the reverse complement of a portion of the SARS-CoV-2 genomic sequence encoding the surface protein (i.e., nucleic acid residues 21,563-25,384 of SEQ ID NO:1), the envelope protein (i.e., nucleic acid residues 26,245-26,472 of SEQ ID NO:1), the membrane protein (i.e., nucleic acid residues 26,523-27,191 of SEQ ID NO:1), the nucleocapsid protein (i.e., nucleic acid residues 28,274-29,533 of SEQ ID NO:1), and/or the accessory proteins, encoded by ORF3a (i.e., nucleic acid residues 25,393-26,220 of SEQ ID NO:1), ORF6 (i.e., nucleic acid residues 27,202-27,387 of SEQ ID NO:1), ORF7a (i.e., nucleic acid residues 27,394-27,759 of SEQ ID NO:1), ORF7b (i.e., nucleic acid residues 27,756-27,887 of SEQ ID NO:1), and ORF8 regions (i.e., nucleic acid residues 27,894-28,259 of SEQ ID NO:1). See SEQ ID NO: 1, Table 5. In some embodiments, the ID-Oligo (or primer) has a nucleotide sequence that is the reverse complement to a portion of a genomic sequence having at least 80%, at least 85%, at least 86%, at least 87%, at least 88%, at least 89%, at least 90%, at least 91%, at least 92%, at least 93%, at least 94%, at least 95%, at least 96%, at least 97%, at least 98%, at least 99%, or 100% sequence identity to any one of SEQ ID NOs:10-89 and/or 270-272.

[0092] As used herein, “luciferase” refers to an oxygenase that catalyzes a luminescence reaction as follows:

[chemical structure]

Thus, luciferase refers to an enzyme or photoprotein that catalyzes a bioluminescent reaction (a reaction that produces bioluminescence) and is a naturally occurring, recombinant, or mutated luciferase unless otherwise specified. When present in nature, luciferase can be readily obtained from an organism by one of ordinary skill in the art. If the luciferase is a naturally occurring luciferase, or a recombinant or mutant luciferase (e.g., a luciferase that retains activity in a luciferase-luciferin reaction of a naturally occurring luciferase), the nucleic acid encoding the luciferase is expressed. It can be easily obtained from transformed cultures of bacteria, yeast, mammalian cells, insect cells, plant cells and the like. Furthermore, recombinant or mutant luciferases can be easily obtained from in vitro cell-free systems that use nucleic acids encoding luciferases. Luciferase is commercially available from, e.g., Promega Corporation (Madison, Wis.). Luciferases, modified mutants or variants thereof are also known in the art and described in, for example, Thorne et al, “Illuminating Insights into Firefly Luciferase and Other Bioluminescent Reporters Used in Chemical Biology,” Chemistry & Biology 17(6):646-657 (2010), which is hereby incorporated by reference in its entirety.

[0093] The “polymerase extension” reaction according to the application includes all forms of template-directed polymerase catalyzed nucleic acid synthesis reactions. As described above, methods herein involve subjecting a polymerase extension mixture to conditions under which a hybridization product from a double-stranded nucleic acid start portion is extended by addition of nucleotides complementary to the single-stranded template region, which is a polymerase extension reaction. Conditions and reagents for primer extension reactions are known in the art, and any of the standard methods, reagents and enzymes, etc. can be used at this stage (see, for example, Green & Sambrook, Molecular Cloning: A Laboratory Manual (4^{th} ed. Cold Spring Harbor Laboratory Press, 2012) which is hereby incorporated by reference in its entirety). Thus, the extension reaction in its most basic form is performed in the presence of the primer (or ID-oligo), deoxynucleotides (dNTP), and a suitable polymerase enzyme, which depends on whether the target is DNA or RNA.

[0094] Polymerases suitable for use in the methods of the present application are well known in the art. In some embodiments, the target at least partially single-stranded viral genome comprises DNA. The polymerase may be a DNA polymerase, e.g., full length BST DNA polymerase, large fragment BST DNA polymerase, BST 2.0 DNA Polymerase, Klenow fragment (3′ to 5′ exo), and DNA Polymerase I (large Klenow fragment). In some embodiments, the target at least partially single-stranded viral genome comprises RNA. Suitable reverse transcriptase enzymes for use in accordance with the present disclosure include for example ProtoScript® II RT, M-MuLV RT, and AMV RT. In some embodiments, the polymerase is stable at temperature ranges from about 15 to about 100° C. The conditions can be selected according to the choice, according to the procedures known in the art.

[0095] Polymerase extension techniques for use in the methods of the present application are isothermal techniques (i.e., those that are performed at a single temperature or where the major aspect of the amplification process is performed at a single temperature). Such techniques rely on the ability of a polymerase to copy the template strand being extended to form a bound duplex.

[0096] Briefly, as used in the methods of the present application, the polymerase extension occurs when the polymerase (e.g., DNA polymerase or reverse transcriptase) binds to a primer-target hybrid (i.e., double-stranded DNA, which is a hybridization product comprising a double-stranded nucleic acid start portion) and extends the complementary DNA strand based on the single-stranded oligonucleotide sequence adjacent to the primer-target hybrid. The extension reaction occurs using available nucleotides provided in a deoxynucleotide (dNTP) mixture added to the reaction.

[0097] Deoxynucleotides (dNTPs) include deoxy-adenosine triphosphate (dATP), deoxy-thymidine triphosphate (dTTP), deoxy-cytosine triphosphate (dCTP), and deoxy-guanosine triphosphate (dGTP). An unmodified form of dATP, if present in the polymerase extension mixture or other dNTP mixtures described herein, may bind to and be hydrolyzed by, luciferase. This reaction of luciferase with the dATP provided with the dNTP mixture may cause unwanted decay high in luminescent signal background, as well unwanted rapid hydrolysis of other reagents including luciferin and magnesium. Accordingly, in some embodiments, unmodified deoxyadenosine triphosphate (dATP) is excluded from the polymerase extension mixture (and other dNTP mixtures described herein). In some embodiments, the polymerase extension mixture (and other dNTP mixtures described herein) is substantially free of unmodified deoxyadenosine triphosphate (dATP). In some embodiments, the polymerase extension mixture (and other dNTP mixtures described herein) comprises a modified form of dATP that does not react with luciferase or does not react with luciferase to cause significant increased background in luminescent signal. In some embodiments, the polymerase extension mixture (and other dNTP mixtures described herein) comprises an alpha phosphate-modified form of dATP. In some embodiments, the polymerase extension mixture (and other dNTP mixtures described herein) comprises dATPaphaS (dATPαS), having the following structural formula:

[chemical structure]

In some embodiments, the single-stranded template region of the target sequence is free of thymine (in the case of a target DNA sequence) or uracil (in the case of a target RNA sequence). In this case, the primer (ID-oligo) is designed to hybridize to a selected portion of the target that is adjacent to a single-stranded template region of the target sequence that is free of thymine (in the case of a target DNA sequence) or uracil (in the case of a target RNA sequence). The single-stranded template region of the target may be at least 5, 10, 15, 20, 25, 30, 25, 40, 45, 50, 55, 60, or more nucleotides in length. As would be readily appreciated, in such embodiments, the polymerase extension reaction by addition of complementary nucleotides to single-stranded template region would not require dATP. Accordingly, in some embodiments, the polymerase extension mixture (and other dNTP mixtures described herein) may be free of modified and unmodified dATP.

[0098] As described above, polymerase extension techniques for use in the methods of the present application are isothermal techniques (i.e., those that are performed at a single temperature or where the major aspect of the amplification process is performed at a single temperature). Accordingly, in certain embodiments, the polymerase extension reaction is carried out at a temperature of 0, 5, 10, 15, 20, 25, 30, 35, 40, 45, 50, 55, 60, 65, 70, 75, 80, 85, 90, or 95 to 100° C. In some embodiments, the polymerase extension reaction is carried out at a temperature of 15 to 45° C. In some embodiments, the polymerase extension reaction is carried out at a temperature of 25 to 40° C. In some embodiments, the polymerase extension reaction is carried out at a temperature of 25 to 45° C.

[0099] The polymerase extension reaction releases two phosphate groups (PPi) per nucleotide added to the nucleic acid strand. In the methods of the present application, the release of these free phosphates (PPi) can then be used to facilitate detection of the target nucleic acid molecule in the sample. Specifically, through the conversion of PPi to ATP via enzymatic reaction and the subsequent bioluminometric detection of ATP using the signal-transducing molecule luciferase, the presence or absence of a target nucleic acid molecule can be detected.

[0100] Luciferase and luciferin are used, in combination, to identify the target nucleic acid since the amount of light generated is substantially proportional to the amount of ATP generated, and, in turn, is directly proportional to the amount of nucleotide incorporated and target nucleic acid present. Thus, the method also includes providing luciferin and O₂, where the luciferin and O₂ are added to the reaction.

[0101] As described above, the method described herein involves subjecting a polymerase extension mixture to conditions under which the target nucleic acid molecule is extended and releases free phosphates. Adenosine triphosphates (ATP) are then produced from the released free phosphates via an enzymatic reaction, which is then metabolized with a luciferase to produce the bioluminescent readout signal. In accordance with this, in one embodiment, producing adenosine triphosphates comprises subjecting the released free phosphates to a coupled glyceraldehyde 3-phosphate dehydrogenase-phosphoglycerate kinase (GAPDH-PGK) enzymatic reaction to produce adenosine triphosphate.

[0102] In this embodiment, the enzymatic reaction involves the GAPDH reacting with PGK in the presence of PPi, adenosine diphosphate (ADP), nicotinamide adenine dinucleotide (NAD+), and glyceraldehyde 3-phosphate (GAP) to produce ATP. ATP then reacts with luciferase to produce a measurable signal. The reaction scheme is shown below:

[chemical structure]

[0103] In another embodiment, adenosine triphosphates may be produced by contacting the released free phosphates with adenosine 5′-phosphosulfate (APS) in the presence of adenosine triphosphate sulfurylase (ATP-sul) to produce adenosine triphosphate. ATP then reacts with luciferase to produce a measurable signal. The reaction scheme is shown below:

[chemical structure]

[0104] The amount of light produced can be easily determined using a suitable reader, e.g., a sensitive device in the appropriate wavelength such as a luminometer. Examples of luminometers include, but are not limited to, SpectraMax L, GloMax® 96-well microplate luminometer, GloMax®-20/20 single-tube luminometer, GloMax® Multi- with Instinct™ software, GloMax®-Multi Jr single tube multimode reader, LUMIstar OPTIMA, LEADER HC′ luminometer, LEADER 450i luminometer, and LEADER 50i luminometer. Thus, luminometric methods offer the advantage of being capable of quantitation.

[0105] In one embodiment, the bioluminescent readout signal is quantified to determine the presence and/or concentration of the target nucleic acid molecule in the sample. The amount of target nucleic acid can be determined from the peak amplitude of the luminescent signal, and/or the time it takes the signal to reach its peak amplitude, and/or the integrated amount of signal emitted over a period of time, and/or from the rate in which luminescence is produced.

[0106] In one embodiment, the target nucleic acid molecule is present in the sample in a concentration of less than 10⁻⁵ moles per liter.

[0107] In one embodiment, the target nucleic acid molecule or fragment thereof has been amplified or subjected to an amplification process. Amplification techniques are well known in the art. Any suitable RNA or DNA amplification technique may be used. In certain example embodiments, the RNA or DNA amplification is an isothermal amplification (e.g., nucleic acid sequenced-based amplification (NASBA), recombinase polymerase amplification (RPA), loop-mediated isothermal amplification (LAMP), strand displacement amplification (SDA), helicase-dependent amplification (HDA), or nicking enzyme amplification reaction (NEAR). In certain example embodiments, non-isothermal amplification methods may be used which include, but are not limited to, PCR (including all PCR-based amplification techniques), multiple displacement amplification (MDA), rolling circle amplification (RCA), ligase chain reaction (LCR), or ramification amplification method (RAM). In such embodiments, the target may be (or the sample containing the target may include) an amplification product. In some embodiments, the target is not amplified (using, e.g., PCR) and the target is not (or the sample containing the target does not contain or is substantially free of) an amplification product.

[0108] In one embodiment, the presence of the target nucleic acid molecule in the sample is determined by a procedure comprising calculating an initial rate of bioluminescent signal production, calculating what time period is needed to achieve peak bioluminescence, and calculating bioluminescent signal peak amplitude or integrated bioluminescent signal from time zero to peak bioluminescence.

[0109] These procedures can be used individually or as part of an analytical method that incorporates two or more procedures for better quantitation. For each procedure or combination of procedures, threshold values can be pre-determined and calibrated to known amounts of nucleic acid targets. Predetermined values can also be useful in identifying similar but non-identical sequences (i.e., mutations) to the desired target. Additionally, the values provided by these analytical procedures can be evaluated against a cut-off value to provide a present/absent measurement, or as a scale to enable quantitative readout.

[0110] In accordance with any of the embodiments described herein, the enzymes may be coupled to a support (e.g., a gel, matrix, nanoparticle, a micro-titer plate well, a membrane, a filter, a microchip, sepharose, thiopropyl-sepharose, sephadex, agarose, silica, magnetic beads, methacrylate beads, or other solid or part-solid (e.g., gel) support).

[0111] In certain embodiments, the reactions of the present application are performed in solution. Accordingly one or more enzymes according to embodiments described herein may remain in solution. The term “in solution” refers to any assay in which the target nucleic acid is detected while in solution or in suspension. The term “in solution” may also refer to any assay in which one or more enzymes of the reaction are in solution or suspension. For example, a reaction according to the present application may be performed with a target at least partially single-stranded viral genome that is in solution and/or an enzyme (or enzymes) that are in solution. In some embodiments, where multiple target at least partially single-stranded viral genomes or in which multiple portions of the target at least partially single-stranded viral genome are detected, a first hybridization to a target single-stranded viral genome (or portion thereof) can be performed with a first ID-Oligo, and a second hybridization to the target nucleic acid can be performed with a second ID-Oligo. Such multiple hybridizations can include a washing step to remove any undesirable (e.g., non-hybridizing sequences) components.

[0112] In some embodiments, the reactions of the present application are carried out with one or more target at least partially single-stranded viral genome(s) and/or one or more enzymes, where the one or more target at least partially single-stranded viral genome(s) and/or the one or more enzymes are coupled to a solid support (e.g., a gel, matrix, nanoparticle, a micro-titer plate well, a membrane, a filter, a microchip, sepharose, thiopropyl-sepharose, sephadex, agarose, silica, magnetic beads, polystyrene, methacrylate beads, or other solid or part-solid (e.g., gel) support). For example, one or more enzymes according to embodiments described herein may be tethered to a nanoparticle (see, e.g., FIG. 4 and FIG. 5). In another example, one or more target single-stranded viral genomes (or portions thereof) are tethered to a solid support (e.g., a gel, matrix, nanoparticle, a micro-titer plate well, a membrane, a filter, a microchip, sepharose, thiopropyl-sepharose, sephadex, agarose, silica, magnetic beads, polystyrene, methacrylate beads, or other solid or part-solid (gel) support). The one or more target single-stranded viral genomes (or portions thereof) may be tethered to a solid support in the form of an array.

[0113] One or more enzymes according to embodiments of the present application may be coupled to a solid support. For example, in accordance with the above embodiments, the glyceraldehyde 3-phosphate dehydrogenase, the phosphoglycerate kinase, and/or the adenosine triphosphate sulfurylase may be coupled to a solid support as described above. In some embodiments, the polymerase is coupled to a solid support. In some embodiments, the luciferase is coupled to a solid support.

[0114] Suitable supports include organic or inorganic materials and may be of any suitable size or shape (e.g., scaffolds sheets, platforms, and/or nanoparticles). Tethering or immobilizing the components of the assays according to the present application serves to, for example, confine them spatially as well as to enhance their stability and/or function in carrying out, for example, a cascading or sequential reaction as part of the particular assay. In certain embodiments, the support materials include, e.g., nucleotide sequences or gels. In certain embodiments, the enzymes or components of the assays according to the present application may be immobilized on or tethered to, for example, a nanoparticle or the luminal surface of a channel (e.g., a microfluidic channel) of a support material such as a platform.

[0115] Several techniques can be used to immobilize components of an assay according to the present application (e.g., enzymes) on surfaces. For example, components may be attached non-specifically or be bound through specific, though non-oriented, chemical reactions (such as carboxy-amide binding). Oriented enzyme immobilization may also be used in accordance with methods of the present application. Oriented enzyme immobilization confers several advantages including, for example, positioning a binding tag (e.g., an affinity tag) so that the activity and stability of the tethered enzyme is optimized (see Mukai et al., “Sequential Reactions of Surface-Tethered Glycolytic Enzymes,” Chem. Biol. 16(9):1013-20 (2009), which is hereby incorporated by reference in its entirety).

[0116] One example of how an enzyme involved in nucleic acid detection would be tethered to a surface is the use of oriented immobilization. In certain embodiments of the assays according to the present application, recombinant enzymes or assay components which are involved in the assay's reactions are engineered with an affinity tag, enabling them to bind to a surface such as silica or nickel, or a component of a surface such as nickel-nitrilotriacetic acid. For example, an affinity tag could be attached at the amino or carboxy terminus of a protein to be immobilized, or be embedded within the protein to be immobilized. The optimal location of the tethering domain will depend upon the nature and location of the enzyme's catalytic domain(s), substrate binding domain(s), and any conformational changes the enzyme must make.

[0117] The use of affinity tagged proteins is especially convenient as the proteins (i.e., DNA polymerase, luciferase, etc.) used in the methods of the present application can readily be expressed as fusions with a suitable binding tag to facilitate immobilization to solid support containing the corresponding capture binding moiety. Suitable capture moieties and binding tag partners that can be used in accordance with this embodiment of the present application include, without limitation, His-Si, His, Si, biotin, streptavidin, Pt, Au, Ag, His-Pt, His-Au, His-Ag, GST, antibody, and epitope tag. Methods of covalently attaching oligonucleotides to a solid support are well known in the art, see e.g., Gosh et al., “Covalent Attachment of Oligonucleotides to Solid Supports,” Nucleic Acids Res. 15(13): 5353-5372 (1987), Joos et al., “Covalent Attachment of Hybridizable Oligonucleotides to Glass Supports,” Anal. Biochem. 247(1):96-101 (1997); Lund et al., “Assessment of Methods for Covalent Binding of Nucleic Acids to Magnetic Beads, Dynabeads, and the Characteristics of the Bound Nucleic Acids in Hybridization Reactions,” Nucleic Acids Res. 16(22):10861-80 (1988), which are hereby incorporated by reference in their entirety.

[0118] In certain embodiments, the polymerase and/or the luciferase is coupled to a solid support.

[0119] In accordance with any aspect of the present application, the polymerase and/or the luciferase may be coupled to the solid support with a linker selected from the group consisting of His-Si, His, Si, biotin, streptavidin, Pt, Au, Ag, His-Pt, His-Au, His-Ag, GST, antibody, and epitope tag.

[0120] The surfaces acting as a support, platform, or scaffold can take multiple forms, including, for example, various nanoparticles, or strands of nucleic acids, and may include various geometries.

[0121] In certain embodiments according to the present application, the support is a nanoparticle. As used herein, the term “nanoparticle” refers to any particle the average diameter of which is in the nanometer range, i.e., having an average diameter up to 1 μm. The nanoparticle used can be made of any suitable organic or inorganic matter that will be known to those of ordinary skill in the art. For example, nanoparticles may be composed of any polymer, iron (KIM oxide, gold, silver, carbon, silica, CdSe and/or CdS. In one embodiment, the nanoparticle is a magnetic nanoparticle. In another embodiment, the nanoparticle is a magnetic, silica-coated nanoparticle (MSP).

[0122] In addition to nanoparticles (NP), supports or scaffolds of different materials can be in the form of rods, planar surfaces, graphene sheets, nanotubes, DNA scaffolds, gels, microspheres, or inner channel walls of a microchannel of a larger support. Quantum dots are also contemplated for use as a support in accordance with the present application. Enzyme immobilization can be attained via non-specific binding, chemical modifications, affinity tags, or other conjugation techniques.

[0123] In one embodiment according to the present application, the methods comprise carrying out a positive and/or negative control. Detection of a diagnostic or prognostic amount of a target nucleic acid is carried out by comparison with a control amount. A control amount of a target nucleic acid can be any amount or a range of amount which is to be compared against a test amount of a target nucleic acid. A control amount may be the amount of a target nucleic acid in a positive or negative control sample carried out as part of the assay according to the present application. A control amount can be either an absolute amount (e.g., μg/ml) or a relative amount (e.g., relative intensity of signals).

[0124] Exemplary negative controls for use in the methods of the present application include a reaction where one or more enzymes and/or ID-Oligos are excluded. In some embodiments the negative control is a blocking oligonucleotide which targets the ID-Oligo or “primer” (modified at the 3′/5′ end to inhibit extension), ribonuclease (RNase) or DNase added to the reaction mixture, a reaction mixture lacking the primer(s), a reaction mixture lacking nucleotides (dNTPs), and a reaction mixture lacking any of the substrates or enzymes. Exemplary positive controls for use in the methods of the present application include various concentrations (including saturating amounts) of target viral genome or fragment thereof (single-stranded DNA or single-stranded RNA oligonucleotide having (i) an identical or substantially identical sequence to at least the portion of the viral genome that is complementary (or capable of hybridizing) to primer(s) provided in connection with embodiments described herein and (ii) a further single-stranded sequence to serve as a template enabling extension by the polymerase); and pre-annealed double-stranded DNA or RNA/DNA with overhanging single-stranded sequence enabling extension by the polymerase. Accordingly, in some embodiments, the method further involves comparing the readout signal to that of a control reaction that lacks the target viral genome. In some embodiments, the concentration of the target viral genome in the sample is determined.

[0125] Accordingly, in some embodiments of the methods of the disclosure, the presence or absence of a target is determined by comparison to a positive and/or negative control. For example, absence of a target viral genome in a provided sample is indicated where a readout signal is not produced/detected for the provided sample according to the methods described herein and (i) a readout signal is produced/detected for a positive control and/or (ii) a readout signal is not produced/detected for a negative control. Alternatively, for example, presence of a target viral genome in a provided sample is indicated where a readout signal is produced/detected for the provided sample according to the methods described herein and (i) a readout signal is produced/detected for a positive control and/or (ii) a readout signal is not produced/detected for a negative control.

[0126] In some embodiments, the sample is a biological sample. In some embodiments the sample comprises or consists of blood, serum, plasma, blood products (e.g., red blood cells, white blood cells, or other blood products), urine, cerebrospinal fluid, saliva, sputum, mucus/cells from nasopharyngeal, oropharyngeal, or nasal-mid-turbinate swabs, tissue, fecal matter or sewage, or a synthetic material.

[0127] In some embodiments, the sample contains a free target at least partially single-stranded viral genome. In accordance with such embodiments, the sample can be directly contacted with the oligonucleotide molecule (i.e., the ID-Oligo) so that the oligonucleotide molecule hybridizes to the selected portion of the target at least partially single-stranded viral genome and forms a hybridization product comprising a double-stranded nucleic acid start portion in the viral genome at a location corresponding to the selected portion and the single-stranded template region is adjacent to the double-stranded nucleic acid start portion. Thus, in some embodiments, the provided sample is not subjected to a treatment to isolate or extract nucleic acids from the sample. In such embodiments, genomic viral DNA or RNA present in the sample (e.g., free or circulating genomic viral DNA or RNA) is subjected to the methods of the disclosure.

[0128] In some embodiments, the sample contains a target at least partially single-stranded viral genome that is enclosed within or complexed with a viral structure or viral protein (e.g., a viral envelope, a viral capsid, or is complexed with a viral nucleocapsid protein). In accordance with such embodiments, the target at least partially single-stranded viral genome is extracted from the viral structure or viral protein using one or more methods known to those skilled in the art. For example, the target at least partially single-stranded viral genome may be purified from a viral structure or viral protein using Trizol reagent and/or MagMAX Viral/Pathogen II Nucleic Acid Isolation Kit (Applied Biosystems, CA); Maxwell® Viral Total Nucleic Acid Purification Kits; Qiagen QIAamp Viral RNA Mini Kit; Qiagen MinElute Virus Spin Kit; QIAGEN with QIAmp DSP Viral RNA Mini Kit; QIAGEN EZ1 Advanced XL with EZ1 DSP Virus Kit; QIAGEN QIAcube with QIAmp DSP Viral RNA Mini Kit; Roche MagNA Pure LC with Total Nucleic Acid Kit; Roche MagNA Pure Compact with Nucleic Acid Isolation Kit; Roche MagNA Pure 96 with DNA and Viral NA Small Volume Kit; QIAGEN RNeasy Mini KIts. Likewise, the sample may also be subjected to steps to extract or isolate the genomic viral DNA or RNA from other components of the sample (e.g., viral membrane envelope). For example, nucleic acids may be isolated or separated from other sample components according to known techniques for nucleic acid isolation (e.g., phenol-chloroform extraction, guanidinium-acid-phenol extraction, density gradient centrifugation using cesium chloride or cesium trifluoroacetate, glass fiber filtration, and magnetic bead separation). In certain embodiments, the sample is contacted with one or more reagents to, e.g., break down the viral membrane. Such reagents include phospholipid-disrupting enzymes and/or detergents (e.g., phospholipases and/or alpha-hemolysin) to break down the viral membrane, as well as proteases (e.g., proteinase K) to break open the viral capsid.

[0129] In some embodiments, providing a sample containing a target at least partially single-stranded viral genome involves collecting the sample from a subject. In some embodiments, the subject is a human, non-human primate, cat, dog, ferret, pig, goat, sheep, cattle, chicken, turkey, duck, camelid, reptile, tiger, bat, pangolin, or amphibian.

[0130] In some embodiments, providing a sample containing a target at least partially single-stranded viral genome involves collecting the sample ex vivo from a surface, material, or inanimate object.

[0131] Various compounds and components may interfere with the methods described herein. For example, FIG. 12 demonstrates the inhibitory effect of sodium azide on the luminescence output of the coupled ATPS-luciferase reaction shown in FIG. 4. Thus, in some embodiments, the sample is free of compounds and components that inhibit the luminescence output of luciferase. Accordingly, the sample may be free of sodium-azide, sodium-citrate, heparin, EDTA, EGTA, proteases, phosphates, 2,2′-azino-di-(3-ethylbenzothiazoline)-6-sulfonic acid (ABTS), and/or butylated hydroxytoluene (BHT). In various related aspects, the present application also relates to devices and kits for performing the methods described herein. Such kits contain monitors, reagents and procedures that can be utilized in a clinical or research setting or adapted for either the field laboratory or on-site use. In particular, kits comprising the disclosed reagents used in practicing the methods described herein include any of a number of means for detecting the captured target nucleic acid molecule and measuring the bioluminescent signal produced subsequent to target capture, along with appropriate instructions, are contemplated. Suitable kits comprise reagents sufficient for performing an assay, or one or more independent steps of an assay, to detect a target nucleic acid molecule, as described herein above.

[0132] It is to be understood that such a kit is useful for any of the methods of the present application. The choice of particular components is dependent upon the particular method the kit is designed to carry out. Additional components can be provided for detection of the analytical output, as measured by the release of ATP and detection of the bioluminescent signal.

[0133] As described above, the kit optionally further comprises instructions for detecting the target nucleic acid nucleic acid by the methods described herein. The instructions present in such a kit instruct the user on how to use the components of the kit to perform the various methods of the present application. These instructions can include a description of the detection methods of the present application, including detection by luminescence.

[0134] Accordingly, another aspect of the present disclosure is a kit for detecting a target at least partially single-stranded viral genome in a sample. The kit includes: a polymerase; a dNTP mixture; one or more enzymes for producing adenosine triphosphates from released free phosphates; and a luciferase for producing a bioluminescent readout signal. In some embodiments, the kit includes: an oligonucleotide molecule complementary to a selected portion of the target at least partially single-stranded viral genome adjacent to a single-stranded template region of the target at least partially single-stranded viral genome.

[0135] Suitable oligonucleotide molecules complementary to a selected portion of the target at least partially single-stranded viral genome (also referred to herein as ID-Oligos or primers), as well as adjacent single-stranded template regions, useful in connection with this aspect of the disclosure are described in connection with the methods of the disclosure.

[0136] In some embodiments, the single-stranded template region is a uracil/thymine-free region. Such single-stranded template regions are described herein above.

[0137] In some embodiments, the kit comprises multiple oligonucleotide molecules for hybridizing to different complementary portions of the target at least partially single-stranded viral genome adjacent to different single-stranded template regions of the target at least partially single-stranded viral genome. In some embodiments, one or more of the different single-stranded template regions is/are uracil/thymine-free regions. In some embodiments, all of the different single-stranded template regions are uracil/thymine-free regions.

[0138] The kits described above may also comprise multiple primers for detecting multiple target nucleic acid molecules and/or multiple fragments thereof. In a contemplated kit for multiplexed primer-mediated specific nucleic acid detection, the kit contains a plurality of primers for nucleic acid targets of interest. Preferably, where the kits contain multiple primers, each of the primers is designed to interrogate a different target nucleic acid sequence or a different fragment thereof.

[0139] Suitable polymerases useful in connection with this aspect of the disclosure are described in connection with the methods described herein. In some embodiments, the polymerase is a reverse transcriptase. In some embodiments, the polymerase is a DNA polymerase. The polymerase may be coupled to a support (e.g., a solid support), as described in accordance with the methods of the disclosure.

[0140] Suitable enzymes for producing adenosine triphosphates from released free phosphates useful in connection with this aspect of the disclosure are described in connection with the methods described herein. In some embodiments, the one or more enzymes for producing adenosine triphosphates from released free phosphates is/are coupled to one or more supports. In some embodiments, the one or more enzymes for producing adenosine triphosphates from released free phosphates includes glyceraldehyde 3-phosphate dehydrogenase and phosphoglycerate kinase. In some embodiments, glyceraldehyde 3-phosphate dehydrogenase and the phosphoglycerate kinase are coupled to a support (e.g., a solid support). As described above, contacting released free phosphates with adenosine 5′-phosphosulfate in the presence of adenosine triphosphate sulfurylase produces adenosine triphosphate. Accordingly, in some embodiments, the one or more enzymes for producing adenosine triphosphates includes adenosine triphosphate sulfurylase and the kit further includes adenosine 5′-phosphosulfate. In some embodiments, the adenosine triphosphate sulfurylase is coupled to a support (e.g., a solid support).

[0141] Suitable luciferase enzymes useful in connection with this aspect of the disclosure are described in connection with the methods described herein. The luciferase may be coupled to a support (e.g., a solid support), as described in accordance with the methods of the disclosure.

[0142] In some embodiments, the kit further includes a device. The device may be, for example, a microfluidic device (e.g., a chip, cartridge, or the like) comprising microfluidic channels, partitions, and/or reaction chambers. The device may also be, for example, a solid surface (e.g., plate) comprising one or more wells. The device may also be, for example, a chromatography device (e.g., a paper chromatography or thin-layer chromatography device). In some embodiments, the device includes at least one channel extending from an inlet, the inlet configured to receive a sample as described herein. In some embodiments, the channel includes reagents used in practicing the methods described herein. The sample moves by, e.g., capillary action through the channel, thereby contacting the reagents described herein to (if the target is present in the sample) result in release of free phosphates to produce a readout signal, as described herein. In some embodiments, the device is in the form of a solid support (e.g., plate or the like) comprising one or more wells. In some embodiments, the device includes at least one well having or connected to an inlet or opening, the inlet or opening configured to receive a sample as described herein. In some embodiments, the well includes reagents used in practicing the methods described herein. The well is configured to receive the sample and thereby the sample contacts reagents described herein to (if the target is present in the sample) result in release of free phosphates to produce a readout signal, as described herein. The device may also include an optical window or display for displaying an optical indication of luminescence/presence of the target in the sample. The device may also include an optical window or display for displaying an optical indication of no detected luminescence/absence of the target in the sample.

[0143] As discussed herein, in some embodiments, a reader (e.g., a luminometer) is used to detect a readout signal. Accordingly, in some embodiments, the device according to embodiments of the disclosure comprises a reader. In some embodiments, the reader is separate from the device according to embodiments of the disclosure (e.g., a stand-alone reader). In some embodiments, the reader is an integral part of a substrate for use with the device (e.g., a single-use or a reusable substrate such as a card or cartridge). The reader may detect a signal produced by a reaction of the presently claimed invention. In some embodiments, the reader detects luminescence produced by the enzymatic reactions carried out within the device. The detection of the signal by reader may indicate the presence of a target single-stranded viral genome. In some embodiments, the reader compares the signal produced by a control reaction with the signal produced by the sample reaction to generate an indication of luminescence/presence of the target in the sample as compared to the control (e.g., a positive or negative control).

[0144] The device may also be configured with more than one channel, well, or the like, each including reagents used in practicing the methods described herein. In this way, each channel may be used to detect presence or absence of a target. The target for detection may be independently selected for each channel and may be directed to, for example, the same or different virus, different variants of a virus, or duplicative targets. In some embodiments, at least one of the channels is utilized for a control as described herein.

[0145] Another aspect of the disclosure is a reaction mixture. The reaction mixture includes: a target at least partially single-stranded viral genome; one or more oligonucleotide molecules, each oligonucleotide molecule complementary to a selected portion of the target at least partially single-stranded viral genome adjacent to a single-stranded template region of the target at least partially single-stranded viral genome; a hybridization product comprising a double-stranded nucleic acid start portion in the viral genome at a location corresponding to the selected portion and the single-stranded template region is adjacent to the double-stranded nucleic acid start portion; a polymerase; and a dNTP mixture. In one embodiment, the dNTP mixture is substantially free of an unmodified form of dATP. In one embodiment, the dNTP mixture comprises dATP, where the dATP is an alpha-phosphate modified adenosine triphosphate (e.g., dATPαS). In some embodiments, the single-stranded template region is a uracil/thymine-free region. Such single-stranded template regions are described herein above.

[0146] Another aspect of the disclosure is a reaction mixture. The reaction mixture includes: one or more oligonucleotide molecules, each oligonucleotide molecule complementary to a selected portion of a target at least partially single-stranded viral genome adjacent to a single-stranded template region of the target at least partially single-stranded viral genome; a polymerase; and a dNTP mixture. In one embodiment, the dNTP mixture is substantially free of an unmodified form of dATP. In one embodiment, the dNTP mixture comprises dATP, where the dATP is an alpha-phosphate modified adenosine triphosphate (e.g., dATPαS). In some embodiments, the single-stranded template region is a uracil/thymine-free region. Such single-stranded template regions are described herein above.

[0147] In some embodiments, the reaction mixtures described herein above include free phosphates. In some embodiments, the reaction mixture includes glyceraldehyde 3-phosphate dehydrogenase and phosphoglycerate kinase. In some embodiments, the reaction mixture includes a luciferase.

[0148] Another aspect of the disclosure is a method of treating a human. The method involves: obtaining a sample from a human; determining a presence or an absence of at least a portion of a single-stranded viral genome in the sample by one or more of the methods of detecting a target described herein; and treating the human based on the presence or absence of at least a portion of the single-stranded genome in the sample.

[0149] Another aspect of the disclosure is a method of treating a non-human subject. The method involves: obtaining a sample from a non-human subject; determining a presence or an absence of at least a portion of a single-stranded viral genome in the sample by one or more of the methods of detecting a target described herein; and treating the non-human subject based on the presence or absence of at least a portion of the single-stranded genome in the sample.

[0150] As used herein the term “therapeutically effective amount” is an amount of an active agent which confers a therapeutic effect on the treated subject, which may be prophylactic or retroactive to the onset of the condition being treated. The therapeutic effect may be objective (e.g., measurable by a quantitative or qualitative test or marker) or subjective (e.g., subject gives an indication of or feels an effect or physician observes a change).

[0151] As used herein the terms “treat,” “treated,” and “treating” refer to both therapeutic treatment and prophylactic or preventative measures, having an objective of protecting (partially or wholly) against, reversing, or slowing down (e.g., reduce or postpone the onset of) an undesired physiological condition, disorder or disease, or to obtain beneficial or desired clinical results such as partial or total restoration or inhibition in decline of a parameter, value, function or result that had or would become abnormal. For the purposes of this application, beneficial or desired clinical results include, but are not limited to, alleviation of symptoms; diminishment of the extent or vigor or rate of development of the condition, disorder or disease; stabilization (i.e., not worsening) of the state of the condition, disorder or disease; delay in onset or slowing of the progression of the condition, disorder or disease; amelioration of the condition, disorder or disease state; and remission (partial or total), whether or not it translates to immediate lessening of actual clinical symptoms, or enhancement or improvement of the condition, disorder or disease. Treatment seeks to elicit a clinically significant response without excessive levels of adverse side effects. The term “disease” as used herein is intended to be generally synonymous, and is used interchangeably with, the terms “disorder,” “syndrome,” and “condition” (as in medical condition), in that all reflect an abnormal condition of the human or animal body or of one of its parts that impairs normal functioning, is typically manifested by distinguishing signs and symptoms, and causes the human or animal to have a reduced duration or quality of life.

[0152] In certain embodiments, the subject described herein is an animal. In certain embodiments, the subject is a mammal. In certain embodiments, the subject is a human. In certain embodiments, the subject is a non-human animal. In certain embodiments, the subject is a non-human mammal. In certain embodiments, the subject is a domesticated animal, such as a dog, cat, cow, pig, horse, sheep, or goat. In certain embodiments, the subject is a companion animal such as a dog or cat. In certain embodiments, the subject is a livestock animal such as a cow, pig, horse, sheep, or goat. In another embodiment, the subject is a research animal such as a rodent, dog, or non-human primate. In certain embodiments, the subject is a non-human transgenic animal such as a transgenic mouse or transgenic pig.

[0153] In some embodiments, the treatment involves administering a therapeutically effective amount of a suitable agent (e.g., an antiviral agent, an antiparasitic agent, or an immunomodulatory agent) to the subject to treat (including, e.g., associated signs and/or symptoms of infection) a viral infection in the subject. Examples of suitable antiviral agents include, but are not limited to, oseltamivir (e.g., TAMIFLU™), zanamivir (e.g., RELENZA™) amantadine, rimantadine, remdesivir, chloroquine, ritonavir, lopinavir, ribavirin, penciclovir, nitazoxanide, nafamostat, favipiravir, corticosteroids, and any combination thereof. Examples of suitable antiparasitic agents include avermectins (e.g., ivermectin); benzimidazoles (e.g., fenbendazole, albendazole, mebendazole), praziquantel, metronidazole, tinidazole, Pyrimidines (e.g., pyrantel, morantel); organophosphates (e.g., dichlorvos, trichlorfom, coumaphos); imidazothiazoles (e.g., levamisole, tetramisole, butamisole); chloroquine, doxycycline, piperazine, amprolium, ronidazole (e.g., BELGA®, RIDSOL-S®, RONIDA®, RONIVET®). Suitable immunomodulatory agents include antibody therapies, immune globulins, corticosteroids (dexamethasone); baricitinib (e.g., OLUMIANT®), oclacitinib (e.g., APOQUEL®), azathioprine (e.g., IMURAN®), 6-mercaptopurine, anakinra (e.g., KINERET®), siltuximab (e.g., SYLVANT®), interferon alpha (IFNα), interferon beta (IFNβ), acalabrutinib (e.g., CALQUENCE®), ibrutinib (e.g., IMBRUVICA®), zanubrutinib (e.g., BRUKINSA®), ruxolitinib (e.g., JAKAFI®), tofacitinib (e.g., XELJANZ XR®); and convalescent plasma.

[0154] The agent may be administered alone or in combination with other therapies (e.g., second antiviral, antiparasitic, and/or immunomodulatory agents). The treatment may be administered to a subject by any route sufficient to achieve therapeutic systemic circulation levels, for example, orally, intranasally, rectally, topically, transmucosally, intravenously, or other parenteral routes of administration such as subcutaneous, intravenous injection (IV), intramuscular injection (IM), intrathecal injection (IT), or intraperitoneal injection (IP). A therapeutically effective amount of the therapy may be administered in a single dose or in multiple doses at pre-determined intervals over time that when added together provides the therapeutically effective amount.

[0155] It will be understood that the specific dose level and frequency of dosage required to provide a therapeutic effect in any particular subject may be varied based upon a variety of factors such as, but not limited to, species, age, body weight, general health, gender, diet, mode of administration, time of administration, rate of metabolism (e.g., half-life), co-administration with one or more other drugs, and severity of the particular condition.

TABLE 9
Sequence Table

| SEQ | Sequence Information (each GenBank Accession No. provided includes additional |
|---|---|
| ID NO: | sequence information and is hereby incorporated by reference in its entirety) |
| 1 | GenBank accession no. NC_045512 (Severe acute respiratory syndrome coronavirus 2 |
| | isolate Wuhan-Hu-1, complete genome) |
| | ATTAAAGGTTTATACCTTCCCAGGTAACAAACCAACCAACTTTCGATCTCTTGTAGATCTGTTCTCT |
| | AAACGAACTTTAAAATCTGTGTGGCTGTCACTCGGCTGCATGCTTAGTGCACTCACGCAGTATAATT |
| | AATAACTAATTACTGTCGTTGACAGGACACGAGTAACTCGTCTATCTTCTGCAGGCTGCTTACGGTT |
| | TCGTCCGTGTTGCAGCCGATCATCAGCACATCTAGGTTTCGTCCGGGTGTGACCGAAAGGTAAGATG |
| | GAGAGCCTTGTCCCTGGTTTCAACGAGAAAACACACGTCCAACTCAGTTTGCCTGTTTTACAGGTTC |
| | GCGACGTGCTCGTACGTGGCTTTGGAGACTCCGTGGAGGAGGTCTTATCAGAGGCACGTCAACATCT |
| | TAAAGATGGCACTTGTGGCTTAGTAGAAGTTGAAAAAGGCGTTTTGCCTCAACTTGAACAGCCCTAT |
| | GTGTTCATCAAACGTTCGGATGCTCGAACTGCACCTCATGGTCATGTTATGGTTGAGCTGGTAGCAG |
| | AACTCGAAGGCATTCAGTACGGTCGTAGTGGTGAGACACTTGGTGTCCTTGTCCCTCATGTGGGCGA |
| | AATACCAGTGGCTTACCGCAAGGTTCTTCTTCGTAAGAACGGTAATAAAGGAGCTGGTGGCCATAGT |
| | TACGGCGCCGATCTAAAGTCATTTGACTTAGGCGACGAGCTTGGCACTGATCCTTATGAAGATTTTC |
| | AAGAAAACTGGAACACTAAACATAGCAGTGGTGTTACCCGTGAACTCATGCGTGAGCTTAACGGAGG |
| | GGCATACACTCGCTATGTCGATAACAACTTCTGTGGCCCTGATGGCTACCCTCTTGAGTGCATTAAA |
| | GACCTTCTAGCACGTGCTGGTAAAGCTTCATGCACTTTGTCCGAACAACTGGACTTTATTGACACTA |
| | AGAGGGGTGTATACTGCTGCCGTGAACATGAGCATGAAATTGCTTGGTACACGGAACGTTCTGAAAA |
| | GAGCTATGAATTGCAGACACCTTTTGAAATTAAATTGGCAAAGAAATTTGACACCTTCAATGGGGAA |
| | TGTCCAAATTTTGTATTTCCCTTAAATTCCATAATCAAGACTATTCAACCAAGGGTTGAAAAGAAAA |
| | AGCTTGATGGCTTTATGGGTAGAATTCGATCTGTCTATCCAGTTGCGTCACCAAATGAATGCAACCA |
| | AATGTGCCTTTCAACTCTCATGAAGTGTGATCATTGTGGTGAAACTTCATGGCAGACGGGCGATTTT |
| | GTTAAAGCCACTTGCGAATTTTGTGGCACTGAGAATTTGACTAAAGAAGGTGCCACTACTTGTGGTT |
| | ACTTACCCCAAAATGCTGTTGTTAAAATTTATTGTCCAGCATGTCACAATTCAGAAGTAGGACCTGA |
| | GCATAGTCTTGCCGAATACCATAATGAATCTGGCTTGAAAACCATTCTTCGTAAGGGTGGTCGCACT |
| | ATTGCCTTTGGAGGCTGTGTGTTCTCTTATGTTGGTTGCCATAACAAGTGTGCCTATTGGGTTCCAC |
| | GTGCTAGCGCTAACATAGGTTGTAACCATACAGGTGTTGTTGGAGAAGGTTCCGAAGGTCTTAATGA |
| | CAACCTTCTTGAAATACTCCAAAAAGAGAAAGTCAACATCAATATTGTTGGTGACTTTAAACTTAAT |
| | GAAGAGATCGCCATTATTTTGGCATCTTTTTCTGCTTCCACAAGTGCTTTTGTGGAAACTGTGAAAG |
| | GTTTGGATTATAAAGCATTCAAACAAATTGTTGAATCCTGTGGTAATTTTAAAGTTACAAAAGGAAA |
| | AGCTAAAAAAGGTGCCTGGAATATTGGTGAACAGAAATCAATACTGAGTCCTCTTTATGCATTTGCA |
| | TCAGAGGCTGCTCGTGTTGTACGATCAATTTTCTCCCGCACTCTTGAAACTGCTCAAAATTCTGTGC |
| | GTGTTTTACAGAAGGCCGCTATAACAATACTAGATGGAATTTCACAGTATTCACTGAGACTCATTGA |
| | TGCTATGATGTTCACATCTGATTTGGCTACTAACAATCTAGTTGTAATGGCCTACATTACAGGTGGT |
| | GTTGTTCAGTTGACTTCGCAGTGGCTAACTAACATCTTTGGCACTGTTTATGAAAAACTCAAACCCG |
| | TCCTTGATTGGCTTGAAGAGAAGTTTAAGGAAGGTGTAGAGTTTCTTAGAGACGGTTGGGAAATTGT |
| | TAAATTTATCTCAACCTGTGCTTGTGAAATTGTCGGTGGACAAATTGTCACCTGTGCAAAGGAAATT |
| | AAGGAGAGTGTTCAGACATTCTTTAAGCTTGTAAATAAATTTTTGGCTTTGTGTGCTGACTCTATCA |
| | TTATTGGTGGAGCTAAACTTAAAGCCTTGAATTTAGGTGAAACATTTGTCACGCACTCAAAGGGATT |
| | GTACAGAAAGTGTGTTAAATCCAGAGAAGAAACTGGCCTACTCATGCCTCTAAAAGCCCCAAAAGAA |
| | ATTATCTTCTTAGAGGGAGAAACACTTCCCACAGAAGTGTTAACAGAGGAAGTTGTCTTGAAAACTG |
| | GTGATTTACAACCATTAGAACAACCTACTAGTGAAGCTGTTGAAGCTCCATTGGTTGGTACACCAGT |
| | TTGTATTAACGGGCTTATGTTGCTCGAAATCAAAGACACAGAAAAGTACTGTGCCCTTGCACCTAAT |
| | ATGATGGTAACAAACAATACCTTCACACTCAAAGGCGGTGCACCAACAAAGGTTACTTTTGGTGATG |
| | ACACTGTGATAGAAGTGCAAGGTTACAAGAGTGTGAATATCACTTTTGAACTTGATGAAAGGATTGA |
| | TAAAGTACTTAATGAGAAGTGCTCTGCCTATACAGTTGAACTCGGTACAGAAGTAAATGAGTTCGCC |
| | TGTGTTGTGGCAGATGCTGTCATAAAAACTTTGCAACCAGTATCTGAATTACTTACACCACTGGGCA |
| | TTGATTTAGATGAGTGGAGTATGGCTACATACTACTTATTTGATGAGTCTGGTGAGTTTAAATTGGC |
| | TTCACATATGTATTGTTCTTTCTACCCTCCAGATGAGGATGAAGAAGAAGGTGATTGTGAAGAAGAA |
| | GAGTTTGAGCCATCAACTCAATATGAGTATGGTACTGAAGATGATTACCAAGGTAAACCTTTGGAAT |
| | TTGGTGCCACTTCTGCTGCTCTTCAACCTGAAGAAGAGCAAGAAGAAGATTGGTTAGATGATGATAG |
| | TCAACAAACTGTTGGTCAACAAGACGGCAGTGAGGACAATCAGACAACTACTATTCAAACAATTGTT |
| | GAGGTTCAACCTCAATTAGAGATGGAACTTACACCAGTTGTTCAGACTATTGAAGTGAATAGTTTTA |
| | GTGGTTATTTAAAACTTACTGACAATGTATACATTAAAAATGCAGACATTGTGGAAGAAGCTAAAAA |
| | GGTAAAACCAACAGTGGTTGTTAATGCAGCCAATGTTTACCTTAAACATGGAGGAGGTGTTGCAGGA |
| | GCCTTAAATAAGGCTACTAACAATGCCATGCAAGTTGAATCTGATGATTACATAGCTACTAATGGAC |
| | CACTTAAAGTGGGTGGTAGTTGTGTTTTAAGCGGACACAATCTTGCTAAACACTGTCTTCATGTTGT |
| | CGGCCCAAATGTTAACAAAGGTGAAGACATTCAACTTCTTAAGAGTGCTTATGAAAATTTTAATCAG |
| | CACGAAGTTCTACTTGCACCATTATTATCAGCTGGTATTTTTGGTGCTGACCCTATACATTCTTTAA |
| | GAGTTTGTGTAGATACTGTTCGCACAAATGTCTACTTAGCTGTCTTTGATAAAAATCTCTATGACAA |
| | ACTTGTTTCAAGCTTTTTGGAAATGAAGAGTGAAAAGCAAGTTGAACAAAAGATCGCTGAGATTCCT |
| | AAAGAGGAAGTTAAGCCATTTATAACTGAAAGTAAACCTTCAGTTGAACAGAGAAAACAAGATGATA |
| | AGAAAATCAAAGCTTGTGTTGAAGAAGTTACAACAACTCTGGAAGAAACTAAGTTCCTCACAGAAAA |
| | CTTGTTACTTTATATTGACATTAATGGCAATCTTCATCCAGATTCTGCCACTCTTGTTAGTGACATT |
| | GACATCACTTTCTTAAAGAAAGATGCTCCATATATAGTGGGTGATGTTGTTCAAGAGGGTGTTTTAA |
| | CTGCTGTGGTTATACCTACTAAAAAGGCTGGTGGCACTACTGAAATGCTAGCGAAAGCTTTGAGAAA |
| | AGTGCCAACAGACAATTATATAACCACTTACCCGGGTCAGGGTTTAAATGGTTACACTGTAGAGGAG |
| | GCAAAGACAGTGCTTAAAAAGTGTAAAAGTGCCTTTTACATTCTACCATCTATTATCTCTAATGAGA |
| | AGCAAGAAATTCTTGGAACTGTTTCTTGGAATTTGCGAGAAATGCTTGCACATGCAGAAGAAACACG |
| | CAAATTAATGCCTGTCTGTGTGGAAACTAAAGCCATAGTTTCAACTATACAGCGTAAATATAAGGGT |
| | ATTAAAATACAAGAGGGTGTGGTTGATTATGGTGCTAGATTTTACTTTTACACCAGTAAAACAACTG |
| | TAGCGTCACTTATCAACACACTTAACGATCTAAATGAAACTCTTGTTACAATGCCACTTGGCTATGT |
| | AACACATGGCTTAAATTTGGAAGAAGCTGCTCGGTATATGAGATCTCTCAAAGTGCCAGCTACAGTT |
| | TCTGTTTCTTCACCTGATGCTGTTACAGCGTATAATGGTTATCTTACTTCTTCTTCTAAAACACCTG |
| | AAGAACATTTTATTGAAACCATCTCACTTGCTGGTTCCTATAAAGATTGGTCCTATTCTGGACAATC |
| | TACACAACTAGGTATAGAATTTCTTAAGAGAGGTGATAAAAGTGTATATTACACTAGTAATCCTACC |
| | ACATTCCACCTAGATGGTGAAGTTATCACCTTTGACAATCTTAAGACACTTCTTTCTTTGAGAGAAG |
| | TGAGGACTATTAAGGTGTTTACAACAGTAGACAACATTAACCTCCACACGCAAGTTGTGGACATGTC |
| | AATGACATATGGACAACAGTTTGGTCCAACTTATTTGGATGGAGCTGATGTTACTAAAATAAAACCT |
| | CATAATTCACATGAAGGTAAAACATTTTATGTTTTACCTAATGATGACACTCTACGTGTTGAGGCTT |
| | TTGAGTACTACCACACAACTGATCCTAGTTTTCTGGGTAGGTACATGTCAGCATTAAATCACACTAA |
| | AAAGTGGAAATACCCACAAGTTAATGGTTTAACTTCTATTAAATGGGCAGATAACAACTGTTATCTT |
| | GCCACTGCATTGTTAACACTCCAACAAATAGAGTTGAAGTTTAATCCACCTGCTCTACAAGATGCTT |
| | ATTACAGAGCAAGGGCTGGTGAAGCTGCTAACTTTTGTGCACTTATCTTAGCCTACTGTAATAAGAC |
| | AGTAGGTGAGTTAGGTGATGTTAGAGAAACAATGAGTTACTTGTTTCAACATGCCAATTTAGATTCT |
| | TGCAAAAGAGTCTTGAACGTGGTGTGTAAAACTTGTGGACAACAGCAGACAACCCTTAAGGGTGTAG |
| | AAGCTGTTATGTACATGGGCACACTTTCTTATGAACAATTTAAGAAAGGTGTTCAGATACCTTGTAC |
| | GTGTGGTAAACAAGCTACAAAATATCTAGTACAACAGGAGTCACCTTTTGTTATGATGTCAGCACCA |
| | CCTGCTCAGTATGAACTTAAGCATGGTACATTTACTTGTGCTAGTGAGTACACTGGTAATTACCAGT |
| | GTGGTCACTATAAACATATAACTTCTAAAGAAACTTTGTATTGCATAGACGGTGCTTTACTTACAAA |
| | GTCCTCAGAATACAAAGGTCCTATTACGGATGTTTTCTACAAAGAAAACAGTTACACAACAACCATA |
| | AAACCAGTTACTTATAAATTGGATGGTGTTGTTTGTACAGAAATTGACCCTAAGTTGGACAATTATT |
| | ATAAGAAAGACAATTCTTATTTCACAGAGCAACCAATTGATCTTGTACCAAACCAACCATATCCAAA |
| | CGCAAGCTTCGATAATTTTAAGTTTGTATGTGATAATATCAAATTTGCTGATGATTTAAACCAGTTA |
| | ACTGGTTATAAGAAACCTGCTTCAAGAGAGCTTAAAGTTACATTTTTCCCTGACTTAAATGGTGATG |
| | TGGTGGCTATTGATTATAAACACTACACACCCTCTTTTAAGAAAGGAGCTAAATTGTTACATAAACC |
| | TATTGTTTGGCATGTTAACAATGCAACTAATAAAGCCACGTATAAACCAAATACCTGGTGTATACGT |
| | TGTCTTTGGAGCACAAAACCAGTTGAAACATCAAATTCGTTTGATGTACTGAAGTCAGAGGACGCGC |
| | AGGGAATGGATAATCTTGCCTGCGAAGATCTAAAACCAGTCTCTGAAGAAGTAGTGGAAAATCCTAC |
| | CATACAGAAAGACGTTCTTGAGTGTAATGTGAAAACTACCGAAGTTGTAGGAGACATTATACTTAAA |
| | CCAGCAAATAATAGTTTAAAAATTACAGAAGAGGTTGGCCACACAGATCTAATGGCTGCTTATGTAG |
| | ACAATTCTAGTCTTACTATTAAGAAACCTAATGAATTATCTAGAGTATTAGGTTTGAAAACCCTTGC |
| | TACTCATGGTTTAGCTGCTGTTAATAGTGTCCCTTGGGATACTATAGCTAATTATGCTAAGCCTTTT |
| | CTTAACAAAGTTGTTAGTACAACTACTAACATAGTTACACGGTGTTTAAACCGTGTTTGTACTAATT |
| | ATATGCCTTATTTCTTTACTTTATTGCTACAATTGTGTACTTTTACTAGAAGTACAAATTCTAGAAT |
| | TAAAGCATCTATGCCGACTACTATAGCAAAGAATACTGTTAAGAGTGTCGGTAAATTTTGTCTAGAG |
| | GCTTCATTTAATTATTTGAAGTCACCTAATTTTTCTAAACTGATAAATATTATAATTTGGTTTTTAC |
| | TATTAAGTGTTTGCCTAGGTTCTTTAATCTACTCAACCGCTGCTTTAGGTGTTTTAATGTCTAATTT |
| | AGGCATGCCTTCTTACTGTACTGGTTACAGAGAAGGCTATTTGAACTCTACTAATGTCACTATTGCA |
| | ACCTACTGTACTGGTTCTATACCTTGTAGTGTTTGTCTTAGTGGTTTAGATTCTTTAGACACCTATC |
| | CTTCTTTAGAAACTATACAAATTACCATTTCATCTTTTAAATGGGATTTAACTGCTTTTGGCTTAGT |
| | TGCAGAGTGGTTTTTGGCATATATTCTTTTCACTAGGTTTTTCTATGTACTTGGATTGGCTGCAATC |
| | ATGCAATTGTTTTTCAGCTATTTTGCAGTACATTTTATTAGTAATTCTTGGCTTATGTGGTTAATAA |
| | TTAATCTTGTACAAATGGCCCCGATTTCAGCTATGGTTAGAATGTACATCTTCTTTGCATCATTTTA |
| | TTATGTATGGAAAAGTTATGTGCATGTTGTAGACGGTTGTAATTCATCAACTTGTATGATGTGTTAG |
| | AAACGTAATAGAGCAACAAGAGTCGAATGTACAACTATTGTTAATGGTGTTAGAAGGTCCTTTTATG |
| | TCTATGCTAATGGAGGTAAAGGCTTTTGCAAACTACACAATTGGAATTGTGTTAATTGTGATACATT |
| | CTGTGCTGGTAGTACATTTATTAGTGATGAAGTTGCGAGAGACTTGTCACTACAGTTTAAAAGACCA |
| | ATAAATCCTACTGACCAGTCTTCTTACATCGTTGATAGTGTTACAGTGAAGAATGGTTCCATCCATC |
| | TTTACTTTGATAAAGCTGGTCAAAAGACTTATGAAAGACATTCTCTCTCTCATTTTGTTAACTTAGA |
| | CAACCTGAGAGCTAATAACACTAAAGGTTCATTGCCTATTAATGTTATAGTTTTTGATGGTAAATCA |
| | AAATGTGAAGAATCATCTGCAAAATCAGCGTCTGTTTACTACAGTCAGCTTATGTGTCAACCTATAC |
| | TGTTACTAGATCAGGCATTAGTGTCTGATGTTGGTGATAGTGCGGAAGTTGCAGTTAAAATGTTTGA |
| | TGCTTACGTTAATACGTTTTCATCAACTTTTAACGTACCAATGGAAAAACTCAAAACACTAGTTGCA |
| | ACTGCAGAAGCTGAACTTGCAAAGAATGTGTCCTTAGACAATGTCTTATCTACTTTTATTTCAGCAG |
| | CTCGGCAAGGGTTTGTTGATTCAGATGTAGAAACTAAAGATGTTGTTGAATGTCTTAAATTGTCACA |
| | TCAATCTGACATAGAAGTTACTGGCGATAGTTGTAATAACTATATGCTCACCTATAACAAAGTTGAA |
| | AACATGACACCCCGTGACCTTGGTGCTTGTATTGACTGTAGTGCGCGTCATATTAATGCGCAGGTAG |
| | CAAAAAGTCACAACATTGCTTTGATATGGAACGTTAAAGATTTCATGTCATTGTCTGAACAACTACG |
| | AAAACAAATACGTAGTGCTGCTAAAAAGAATAACTTACCTTTTAAGTTGACATGTGCAACTACTAGA |
| | CAAGTTGTTAATGTTGTAACAACAAAGATAGCACTTAAGGGTGGTAAAATTGTTAATAATTGGTTGA |
| | AGCAGTTAATTAAAGTTACACTTGTGTTCCTTTTTGTTGCTGCTATTTTCTATTTAATAACACCTGT |
| | TCATGTCATGTCTAAACATACTGACTTTTCAAGTGAAATCATAGGATACAAGGCTATTGATGGTGGT |
| | GTCACTCGTGACATAGCATCTACAGATACTTGTTTTGCTAACAAACATGCTGATTTTGACACATGGT |
| | TTAGCCAGCGTGGTGGTAGTTATACTAATGACAAAGCTTGCCCATTGATTGCTGCAGTCATAACAAG |
| | AGAAGTGGGTTTTGTCGTGCCTGGTTTGCCTGGCACGATATTACGCACAACTAATGGTGACTTTTTG |
| | CATTTCTTACCTAGAGTTTTTAGTGCAGTTGGTAACATCTGTTACACACCATCAAAACTTATAGAGT |
| | ACACTGACTTTGCAACATCAGCTTGTGTTTTGGCTGCTGAATGTACAATTTTTAAAGATGCTTCTGG |
| | TAAGCCAGTACCATATTGTTATGATACCAATGTACTAGAAGGTTCTGTTGCTTATGAAAGTTTACGC |
| | CCTGACACACGTTATGTGCTCATGGATGGCTCTATTATTCAATTTCCTAACACCTACCTTGAAGGTT |
| | CTGTTAGAGTGGTAACAACTTTTGATTCTGAGTACTGTAGGCACGGCACTTGTGAAAGATCAGAAGC |
| | TGGTGTTTGTGTATCTACTAGTGGTAGATGGGTACTTAACAATGATTATTACAGATCTTTACCAGGA |
| | GTTTTCTGTGGTGTAGATGCTGTAAATTTACTTACTAATATGTTTACACCACTAATTCAACCTATTG |
| | GTGCTTTGGACATATCAGCATCTATAGTAGCTGGTGGTATTGTAGCTATCGTAGTAACATGCCTTGC |
| | CTACTATTTTATGAGGTTTAGAAGAGCTTTTGGTGAATACAGTCATGTAGTTGCCTTTAATACTTTA |
| | CTATTCCTTATGTCATTCACTGTACTCTGTTTAACACCAGTTTACTCATTCTTACCTGGTGTTTATT |
| | CTGTTATTTACTTGTACTTGACATTTTATCTTACTAATGATGTTTCTTTTTTAGCACATATTCAGTG |
| | GATGGTTATGTTCACACCTTTAGTACCTTTCTGGATAACAATTGCTTATATCATTTGTATTTCCACA |
| | AAGCATTTCTATTGGTTCTTTAGTAATTACCTAAAGAGACGTGTAGTCTTTAATGGTGTTTCCTTTA |
| | GTACTTTTGAAGAAGCTGCGCTGTGCACCTTTTTGTTAAATAAAGAAATGTATCTAAAGTTGCGTAG |
| | TGATGTGCTATTACCTCTTACGCAATATAATAGATACTTAGCTCTTTATAATAAGTACAAGTATTTT |
| | AGTGGAGCAATGGATACAACTAGCTACAGAGAAGCTGCTTGTTGTCATCTCGCAAAGGCTCTCAATG |
| | ACTTCAGTAACTCAGGTTCTGATGTTCTTTACCAACCACCACAAACCTCTATCACCTCAGCTGTTTT |
| | GCAGAGTGGTTTTAGAAAAATGGCATTCCCATCTGGTAAAGTTGAGGGTTGTATGGTACAAGTAACT |
| | TGTGGTACAACTACACTTAACGGTCTTTGGCTTGATGACGTAGTTTACTGTCCAAGACATGTGATCT |
| | GCACCTCTGAAGACATGCTTAACCCTAATTATGAAGATTTACTCATTCGTAAGTCTAATCATAATTT |
| | CTTGGTACAGGCTGGTAATGTTCAACTCAGGGTTATTGGACATTCTATGCAAAATTGTGTACTTAAG |
| | CTTAAGGTTGATACAGCCAATCCTAAGACACCTAAGTATAAGTTTGTTCGCATTCAACCAGGACAGA |
| | CTTTTTCAGTGTTAGCTTGTTACAATGGTTCACCATCTGGTGTTTACCAATGTGCTATGAGGCCCAA |
| | TTTCACTATTAAGGGTTCATTCCTTAATGGTTCATGTGGTAGTGTTGGTTTTAACATAGATTATGAC |
| | TGTGTCTCTTTTTGTTACATGCACCATATGGAATTACCAACTGGAGTTCATGCTGGCACAGACTTAG |
| | AAGGTAACTTTTATGGACCTTTTGTTGACAGGCAAACAGCACAAGCAGCTGGTACGGACACAACTAT |
| | TACAGTTAATGTTTTAGCTTGGTTGTACGCTGCTGTTATAAATGGAGACAGGTGGTTTCTCAATCGA |
| | TTTACCACAACTCTTAATGACTTTAACCTTGTGGCTATGAAGTACAATTATGAACCTCTAACACAAG |
| | ACCATGTTGACATACTAGGACCTCTTTCTGCTCAAACTGGAATTGCCGTTTTAGATATGTGTGCTTC |
| | ATTAAAAGAATTACTGCAAAATGGTATGAATGGACGTACCATATTGGGTAGTGCTTTATTAGAAGAT |
| | GAATTTACACCTTTTGATGTTGTTAGACAATGCTCAGGTGTTACTTTCCAAAGTGCAGTGAAAAGAA |
| | CAATCAAGGGTACACACCACTGGTTGTTACTCACAATTTTGACTTCACTTTTAGTTTTAGTCCAGAG |
| | TACTCAATGGTCTTTGTTCTTTTTTTTGTATGAAAATGCCTTTTTACCTTTTGCTATGGGTATTATT |
| | GCTATGTCTGCTTTTGCAATGATGTTTGTCAAACATAAGCATGCATTTCTCTGTTTGTTTTTGTTAC |
| | CTTCTCTTGCCACTGTAGCTTATTTTAATATGGTCTATATGCCTGCTAGTTGGGTGATGCGTATTAT |
| | GACATGGTTGGATATGGTTGATACTAGTTTGTCTGGTTTTAAGCTAAAAGACTGTGTTATGTATGCA |
| | TCAGCTGTAGTGTTACTAATCCTTATGACAGCAAGAACTGTGTATGATGATGGTGCTAGGAGAGTGT |
| | GGACACTTATGAATGTCTTGACACTCGTTTATAAAGTTTATTATGGTAATGCTTTAGATCAAGCCAT |
| | TTCCATGTGGGCTCTTATAATCTCTGTTACTTCTAACTACTCAGGTGTAGTTACAACTGTCATGTTT |
| | TTGGCCAGAGGTATTGTTTTTATGTGTGTTGAGTATTGCCCTATTTTCTTCATAACTGGTAATACAC |
| | TTCAGTGTATAATGCTAGTTTATTGTTTCTTAGGCTATTTTTGTACTTGTTACTTTGGCCTCTTTTG |
| | TTTACTCAACCGCTACTTTAGACTGACTCTTGGTGTTTATGATTACTTAGTTTCTACACAGGAGTTT |
| | AGATATATGAATTCACAGGGACTACTCCCACCCAAGAATAGCATAGATGCCTTCAAACTCAACATTA |
| | AATTGTTGGGTGTTGGTGGCAAACCTTGTATCAAAGTAGCCACTGTACAGTCTAAAATGTCAGATGT |
| | AAAGTGCACATCAGTAGTCTTACTCTCAGTTTTGCAACAACTCAGAGTAGAATCATCATCTAAATTG |
| | TGGGCTCAATGTGTCCAGTTACACAATGACATTCTCTTAGCTAAAGATACTACTGAAGCCTTTGAAA |
| | AAATGGTTTCACTACTTTCTGTTTTGCTTTCCATGCAGGGTGCTGTAGACATAAACAAGCTTTGTGA |
| | AGAAATGCTGGACAACAGGGCAACCTTACAAGCTATAGCCTCAGAGTTTAGTTCCCTTCCATCATAT |
| | GCAGCTTTTGCTACTGCTCAAGAAGCTTATGAGCAGGCTGTTGCTAATGGTGATTCTGAAGTTGTTC |
| | TTAAAAAGTTGAAGAAGTCTTTGAATGTGGCTAAATCTGAATTTGACCGTGATGCAGCCATGCAACG |
| | TAAGTTGGAAAAGATGGCTGATCAAGCTATGACCCAAATGTATAAACAGGCTAGATCTGAGGACAAG |
| | AGGGCAAAAGTTACTAGTGCTATGCAGACAATGCTTTTCACTATGCTTAGAAAGTTGGATAATGATG |
| | CACTCAACAACATTATCAACAATGCAAGAGATGGTTGTGTTCCCTTGAACATAATACCTCTTACAAC |
| | AGCAGCCAAACTAATGGTTGTCATACCAGACTATAACACATATAAAAATACGTGTGATGGTACAACA |
| | TTTACTTATGCATCAGCATTGTGGGAAATCCAACAGGTTGTAGATGCAGATAGTAAAATTGTTCAAC |
| | TTAGTGAAATTAGTATGGACAATTCACCTAATTTAGCATGGCCTCTTATTGTAACAGCTTTAAGGGC |
| | CAATTCTGCTGTCAAATTACAGAATAATGAGCTTAGTCCTGTTGCACTACGACAGATGTCTTGTGCT |
| | GCCGGTACTACACAAACTGCTTGCACTGATGACAATGCGTTAGCTTACTACAACACAACAAAGGGAG |
| | GTAGGTTTGTACTTGCACTGTTATCCGATTTACAGGATTTGAAATGGGCTAGATTCCCTAAGAGTGA |
| | TGGAACTGGTACTATCTATACAGAACTGGAACCACCTTGTAGGTTTGTTACAGACACACCTAAAGGT |
| | CCTAAAGTGAAGTATTTATACTTTATTAAAGGATTAAACAACCTAAATAGAGGTATGGTACTTGGTA |
| | GTTTAGCTGCCACAGTACGTCTACAAGCTGGTAATGCAACAGAAGTGCCTGCCAATTCAACTGTATT |
| | ATCTTTCTGTGCTTTTGCTGTAGATGCTGCTAAAGCTTACAAAGATTATCTAGCTAGTGGGGGACAA |
| | CCAATCACTAATTGTGTTAAGATGTTGTGTACACACACTGGTACTGGTCAGGCAATAACAGTTACAC |
| | CGGAAGCCAATATGGATCAAGAATCCTTTGGTGGTGCATCGTGTTGTCTGTACTGCCGTTGCCACAT |
| | AGATCATCCAAATCCTAAAGGATTTTGTGACTTAAAAGGTAAGTATGTACAAATACCTACAACTTGT |
| | GCTAATGACCCTGTGGGTTTTACACTTAAAAACACAGTCTGTACCGTCTGCGGTATGTGGAAAGGTT |
| | ATGGCTGTAGTTGTGATCAACTCCGCGAACCCATGCTTCAGTCAGCTGATGCACAATCGTTTTTAAA |
| | CGGGTTTGCGGTGTAAGTGCAGCCCGTCTTACACCGTGCGGCACAGGCACTAGTACTGATGTCGTAT |
| | ACAGGGCTTTTGACATCTACAATGATAAAGTAGCTGGTTTTGCTAAATTCCTAAAAACTAATTGTTG |
| | TCGCTTCCAAGAAAAGGACGAAGATGACAATTTAATTGATTCTTACTTTGTAGTTAAGAGACACACT |
| | TTCTCTAACTACCAACATGAAGAAACAATTTATAATTTACTTAAGGATTGTCCAGCTGTTGCTAAAC |
| | ATGACTTCTTTAAGTTTAGAATAGACGGTGACATGGTACCACATATATCACGTCAACGTCTTACTAA |
| | ATACACAATGGCAGACCTCGTCTATGCTTTAAGGCATTTTGATGAAGGTAATTGTGACACATTAAAA |
| | GAAATACTTGTCACATACAATTGTTGTGATGATGATTATTTCAATAAAAAGGACTGGTATGATTTTG |
| | TAGAAAACCCAGATATATTACGCGTATACGCCAACTTAGGTGAACGTGTACGCCAAGCTTTGTTAAA |
| | AACAGTACAATTCTGTGATGCCATGCGAAATGCTGGTATTGTTGGTGTACTGACATTAGATAATCAA |
| | GATCTCAATGGTAACTGGTATGATTTCGGTGATTTCATACAAACCACGCCAGGTAGTGGAGTTCCTG |
| | TTGTAGATTCTTATTATTCATTGTTAATGCCTATATTAACCTTGACCAGGGCTTTAACTGCAGAGTC |
| | ACATGTTGACACTGACTTAACAAAGCCTTACATTAAGTGGGATTTGTTAAAATATGACTTCACGGAA |
| | GAGAGGTTAAAACTCTTTGACCGTTATTTTAAATATTGGGATCAGACATACCACCCAAATTGTGTTA |
| | ACTGTTTGGATGACAGATGCATTCTGCATTGTGCAAACTTTAATGTTTTATTCTCTACAGTGTTCCC |
| | ACCTACAAGTTTTGGACCACTAGTGAGAAAAATATTTGTTGATGGTGTTCCATTTGTAGTTTCAACT |
| | GGATACCACTTCAGAGAGCTAGGTGTTGTACATAATCAGGATGTAAACTTACATAGCTCTAGACTTA |
| | GTTTTAAGGAATTACTTGTGTATGCTGCTGACCCTGCTATGCACGCTGCTTCTGGTAATCTATTACT |
| | AGATAAACGCACTACGTGCTTTTCAGTAGCTGCACTTACTAACAATGTTGCTTTTCAAACTGTCAAA |
| | CCCGGTAATTTTAACAAAGACTTCTATGACTTTGCTGTGTCTAAGGGTTTCTTTAAGGAAGGAAGTT |
| | CTGTTGAATTAAAACACTTCTTCTTTGCTCAGGATGGTAATGCTGCTATCAGCGATTATGACTACTA |
| | TCGTTATAATCTACCAACAATGTGTGATATCAGACAACTACTATTTGTAGTTGAAGTTGTTGATAAG |
| | TACTTTGATTGTTACGATGGTGGCTGTATTAATGCTAACCAAGTCATCGTCAACAACCTAGACAAAT |
| | CAGCTGGTTTTCCATTTAATAAATGGGGTAAGGCTAGACTTTATTATGATTCAATGAGTTATGAGGA |
| | TCAAGATGCACTTTTCGCATATACAAAACGTAATGTCATCCCTACTATAACTCAAATGAATCTTAAG |
| | TATGCCATTAGTGCAAAGAATAGAGCTCGCACCGTAGCTGGTGTCTCTATCTGTAGTACTATGACCA |
| | ATAGACAGTTTCATCAAAAATTATTGAAATCAATAGCCGCCACTAGAGGAGCTACTGTAGTAATTGG |
| | AACAAGCAAATTCTATGGTGGTTGGCACAACATGTTAAAAACTGTTTATAGTGATGTAGAAAACCCT |
| | CACCTTATGGGTTGGGATTATCCTAAATGTGATAGAGCCATGCCTAACATGCTTAGAATTATGGCCT |
| | CACTTGTTCTTGCTCGCAAACATACAACGTGTTGTAGCTTGTCACACCGTTTCTATAGATTAGCTAA |
| | TGAGTGTGCTCAAGTATTGAGTGAAATGGTCATGTGTGGCGGTTCACTATATGTTAAACCAGGTGGA |
| | ACCTCATCAGGAGATGCCACAACTGCTTATGCTAATAGTGTTTTTAACATTTGTCAAGCTGTCACGG |
| | CCAATGTTAATGCACTTTTATCTACTGATGGTAACAAAATTGCCGATAAGTATGTCCGCAATTTACA |
| | ACACAGACTTTATGAGTGTCTCTATAGAAATAGAGATGTTGACACAGACTTTGTGAATGAGTTTTAG |
| | GCATATTTGCGTAAACATTTCTCAATGATGATACTCTCTGACGATGCTGTTGTGTGTTTCAATAGCA |
| | CTTATGCATCTCAAGGTCTAGTGGCTAGCATAAAGAACTTTAAGTCAGTTCTTTATTATCAAAACAA |
| | TGTTTTTATGTCTGAAGCAAAATGTTGGACTGAGACTGACCTTACTAAAGGACCTCATGAATTTTGC |
| | TCTCAACATACAATGCTAGTTAAACAGGGTGATGATTATGTGTACCTTCCTTACCCAGATCCATCAA |
| | GAATCCTAGGGGCCGGCTGTTTTGTAGATGATATCGTAAAAACAGATGGTACACTTATGATTGAACG |
| | GTTCGTGTCTTTAGCTATAGATGCTTACCCACTTACTAAACATCCTAATCAGGAGTATGCTGATGTC |
| | TTTCATTTGTACTTACAATACATAAGAAAGCTAGATGATGAGTTAACAGGACACATGTTAGACATGT |
| | ATTCTGTTATGCTTACTAATGATAACACTTCAAGGTATTGGGAACCTGAGTTTTATGAGGCTATGTA |
| | CACACCGCATACAGTCTTACAGGCTGTTGGGGCTTGTGTTCTTTGCAATTCACAGACTTCATTAAGA |
| | TGTGGTGCTTGCATACGTAGACCATTCTTATGTTGTAAATGCTGTTACGACCATGTCATATCAACAT |
| | CACATAAATTAGTCTTGTCTGTTAATCCGTATGTTTGCAATGCTCCAGGTTGTGATGTCACAGATGT |
| | GACTCAACTTTACTTAGGAGGTATGAGCTATTATTGTAAATCACATAAACCACCCATTAGTTTTCCA |
| | TTGTGTGCTAATGGACAAGTTTTTGGTTTATATAAAAATACATGTGTTGGTAGCGATAATGTTACTG |
| | ACTTTAATGCAATTGCAACATGTGACTGGACAAATGCTGGTGATTACATTTTAGCTAACACCTGTAC |
| | TGAAAGACTCAAGCTTTTTGCAGCAGAAACGCTCAAAGCTACTGAGGAGACATTTAAACTGTCTTAT |
| | GGTATTGCTACTGTACGTGAAGTGCTGTCTGACAGAGAATTACATCTTTCATGGGAAGTTGGTAAAC |
| | CTAGACCACCACTTAACCGAAATTATGTCTTTACTGGTTATCGTGTAACTAAAAACAGTAAAGTACA |
| | AATAGGAGAGTACACCTTTGAAAAAGGTGACTATGGTGATGCTGTTGTTTACCGAGGTACAACAACT |
| | TACAAATTAAATGTTGGTGATTATTTTGTGCTGACATCACATACAGTAATGCCATTAAGTGCACCTA |
| | CACTAGTGCCACAAGAGCACTATGTTAGAATTACTGGCTTATACCCAACACTCAATATCTCAGATGA |
| | GTTTTCTAGCAATGTTGCAAATTATCAAAAGGTTGGTATGCAAAAGTATTCTACACTCCAGGGACCA |
| | CCTGGTACTGGTAAGAGTCATTTTGCTATTGGCCTAGCTCTCTACTACCCTTCTGCTCGCATAGTGT |
| | ATACAGCTTGCTCTCATGCCGCTGTTGATGCACTATGTGAGAAGGCATTAAAATATTTGCCTATAGA |
| | TAAATGTAGTAGAATTATACCTGCACGTGCTCGTGTAGAGTGTTTTGATAAATTCAAAGTGAATTCA |
| | ACATTAGAACAGTATGTCTTTTGTACTGTAAATGCATTGCCTGAGACGACAGCAGATATAGTTGTCT |
| | TTGATGAAATTTCAATGGCCACAAATTATGATTTGAGTGTTGTCAATGCCAGATTACGTGCTAAGCA |
| | CTATGTGTACATTGGCGACCCTGCTCAATTACCTGCACCACGCACATTGCTAACTAAGGGCACACTA |
| | GAACCAGAATATTTCAATTCAGTGTGTAGACTTATGAAAACTATAGGTCCAGACATGTTCCTCGGAA |
| | CTTGTCGGCGTTGTCCTGCTGAAATTGTTGACACTGTGAGTGCTTTGGTTTATGATAATAAGCTTAA |
| | AGCACATAAAGACAAATCAGCTCAATGCTTTAAAATGTTTTATAAGGGTGTTATCACGCATGATGTT |
| | TCATCTGCAATTAACAGGCCACAAATAGGCGTGGTAAGAGAATTCCTTACACGTAACCCTGCTTGGA |
| | GAAAAGCTGTCTTTATTTCACCTTATAATTCACAGAATGCTGTAGCCTCAAAGATTTTGGGACTACC |
| | AACTCAAACTGTTGATTCATCACAGGGCTCAGAATATGACTATGTCATATTCACTCAAACCACTGAA |
| | ACAGCTCACTCTTGTAATGTAAACAGATTTAATGTTGCTATTACCAGAGCAAAAGTAGGCATACTTT |
| | GCATAATGTCTGATAGAGACCTTTATGACAAGTTGCAATTTACAAGTCTTGAAATTCCACGTAGGAA |
| | TGTGGCAACTTTACAAGCTGAAAATGTAACAGGACTCTTTAAAGATTGTAGTAAGGTAATCACTGGG |
| | TTACATCCTACACAGGCACCTACACACCTCAGTGTTGACACTAAATTCAAAACTGAAGGTTTATGTG |
| | TTGACATACCTGGCATACCTAAGGACATGACCTATAGAAGACTCATCTCTATGATGGGTTTTAAAAT |
| | GAATTATCAAGTTAATGGTTACCCTAACATGTTTATCACCCGCGAAGAAGCTATAAGACATGTACGT |
| | GCATGGATTGGCTTCGATGTCGAGGGGTGTCATGCTACTAGAGAAGCTGTTGGTACCAATTTACCTT |
| | TACAGCTAGGTTTTTCTACAGGTGTTAACCTAGTTGCTGTACCTACAGGTTATGTTGATACACCTAA |
| | TAATACAGATTTTTCCAGAGTTAGTGCTAAACCACCGCCTGGAGATCAATTTAAACACCTCATACCA |
| | CTTATGTACAAAGGACTTCCTTGGAATGTAGTGCGTATAAAGATTGTACAAATGTTAAGTGACACAC |
| | TTAAAAATCTCTCTGACAGAGTCGTATTTGTCTTATGGGCACATGGCTTTGAGTTGACATCTATGAA |
| | GTATTTTGTGAAAATAGGACCTGAGCGCACCTGTTGTCTATGTGATAGACGTGCCACATGCTTTTCC |
| | ACTGCTTCAGACACTTATGCCTGTTGGCATCATTCTATTGGATTTGATTACGTCTATAATCCGTTTA |
| | TGATTGATGTTCAACAATGGGGTTTTACAGGTAACCTACAAAGCAACCATGATCTGTATTGTCAAGT |
| | CCATGGTAATGCACATGTAGCTAGTTGTGATGCAATCATGACTAGGTGTCTAGCTGTCCACGAGTGC |
| | TTTGTTAAGCGTGTTGACTGGACTATTGAATATCCTATAATTGGTGATGAACTGAAGATTAATGCGG |
| | CTTGTAGAAAGGTTCAACACATGGTTGTTAAAGCTGCATTATTAGCAGACAAATTCCCAGTTCTTCA |
| | CGACATTGGTAACCCTAAAGCTATTAAGTGTGTACCTCAAGCTGATGTAGAATGGAAGTTCTATGAT |
| | GCACAGCCTTGTAGTGACAAAGCTTATAAAATAGAAGAATTATTCTATTCTTATGCCACACATTCTG |
| | ACAAATTCACAGATGGTGTATGCCTATTTTGGAATTGCAATGTCGATAGATATCCTGCTAATTCCAT |
| | TGTTTGTAGATTTGACACTAGAGTGCTATCTAACCTTAACTTGCCTGGTTGTGATGGTGGCAGTTTG |
| | TATGTAAATAAACATGCATTCCACACACCAGCTTTTGATAAAAGTGCTTTTGTTAATTTAAAACAAT |
| | TACCATTTTTCTATTACTCTGACAGTCCATGTGAGTCTCATGGAAAACAAGTAGTGTCAGATATAGA |
| | TTATGTACCACTAAAGTCTGCTACGTGTATAACACGTTGCAATTTAGGTGGTGCTGTCTGTAGACAT |
| | CATGCTAATGAGTACAGATTGTATCTCGATGCTTATAACATGATGATCTCAGCTGGCTTTAGCTTGT |
| | GGGTTTACAAACAATTTGATACTTATAACCTCTGGAACACTTTTACAAGACTTCAGAGTTTAGAAAA |
| | TGTGGCTTTTAATGTTGTAAATAAGGGACACTTTGATGGACAACAGGGTGAAGTACCAGTTTCTATC |
| | ATTAATAACACTGTTTACACAAAAGTTGATGGTGTTGATGTAGAATTGTTTGAAAATAAAACAACAT |
| | TACCTGTTAATGTAGCATTTGAGCTTTGGGCTAAGCGCAACATTAAACCAGTACCAGAGGTGAAAAT |
| | ACTCAATAATTTGGGTGTGGACATTGCTGCTAATACTGTGATCTGGGACTACAAAAGAGATGCTCCA |
| | GCACATATATCTACTATTGGTGTTTGTTCTATGACTGACATAGCCAAGAAACCAACTGAAACGATTT |
| | GTGCACCACTCACTGTCTTTTTTGATGGTAGAGTTGATGGTCAAGTAGACTTATTTAGAAATGCCCG |
| | TAATGGTGTTCTTATTACAGAAGGTAGTGTTAAAGGTTTACAACCATCTGTAGGTCCCAAACAAGCT |
| | AGTCTTAATGGAGTCACATTAATTGGAGAAGCCGTAAAAACACAGTTCAATTATTATAAGAAAGTTG |
| | ATGGTGTTGTCCAACAATTACCTGAAACTTACTTTACTCAGAGTAGAAATTTACAAGAATTTAAACC |
| | CAGGAGTCAAATGGAAATTGATTTCTTAGAATTAGCTATGGATGAATTCATTGAACGGTATAAATTA |
| | GAAGGCTATGCCTTCGAACATATCGTTTATGGAGATTTTAGTCATAGTCAGTTAGGTGGTTTACATC |
| | TACTGATTGGACTAGCTAAACGTTTTAAGGAATCACCTTTTGAATTAGAAGATTTTATTCCTATGGA |
| | CAGTACAGTTAAAAACTATTTCATAACAGATGCGCAAACAGGTTCATCTAAGTGTGTGTGTTCTGTT |
| | ATTGATTTATTACTTGATGATTTTGTTGAAATAATAAAATCCCAAGATTTATCTGTAGTTTCTAAGG |
| | TTGTCAAAGTGACTATTGACTATACAGAAATTTCATTTATGCTTTGGTGTAAAGATGGCCATGTAGA |
| | AACATTTTACCCAAAATTACAATCTAGTCAAGCGTGGCAACCGGGTGTTGCTATGCCTAATCTTTAC |
| | AAAATGCAAAGAATGCTATTAGAAAAGTGTGACCTTCAAAATTATGGTGATAGTGCAACATTACCTA |
| | AAGGCATAATGATGAATGTCGCAAAATATACTCAACTGTGTCAATATTTAAACACATTAACATTAGC |
| | TGTACCCTATAATATGAGAGTTATACATTTTGGTGCTGGTTCTGATAAAGGAGTTGCACCAGGTACA |
| | GCTGTTTTAAGACAGTGGTTGCCTACGGGTACGCTGCTTGTCGATTCAGATCTTAATGACTTTGTCT |
| | CTGATGCAGATTCAACTTTGATTGGTGATTGTGCAACTGTACATACAGCTAATAAATGGGATCTCAT |
| | TATTAGTGATATGTACGACCCTAAGACTAAAAATGTTACAAAAGAAAATGACTCTAAAGAGGGTTTT |
| | TTCACTTACATTTGTGGGTTTATACAACAAAAGCTAGCTCTTGGAGGTTCCGTGGCTATAAAGATAA |
| | CAGAACATTCTTGGAATGCTGATCTTTATAAGCTCATGGGACACTTCGCATGGTGGACAGCCTTTGT |
| | TACTAATGTGAATGCGTCATCATCTGAAGCATTTTTAATTGGATGTAATTATCTTGGCAAACCACGC |
| | GAACAAATAGATGGTTATGTCATGCATGCAAATTACATATTTTGGAGGAATACAAATCCAATTCAGT |
| | TGTCTTCCTATTCTTTATTTGACATGAGTAAATTTCCCCTTAAATTAAGGGGTACTGCTGTTATGTC |
| | TTTAAAAGAAGGTCAAATCAATGATATGATTTTATCTCTTCTTAGTAAAGGTAGACTTATAATTAGA |
| | GAAAACAACAGAGTTGTTATTTCTAGTGATGTTCTTGTTAACAACTAAACGAACAATGTTTGTTTTT |
| | CTTGTTTTATTGCCACTAGTCTCTAGTCAGTGTGTTAATCTTACAACCAGAACTCAATTACCCCCTG |
| | CATACACTAATTCTTTCACACGTGGTGTTTATTACCCTGACAAAGTTTTCAGATCCTCAGTTTTACA |
| | TTCAACTCAGGACTTGTTCTTACCTTTCTTTTCCAATGTTACTTGGTTCCATGCTATACATGTCTCT |
| | GGGACCAATGGTACTAAGAGGTTTGATAACCCTGTCCTACCATTTAATGATGGTGTTTATTTTGCTT |
| | CCACTGAGAAGTCTAACATAATAAGAGGCTGGATTTTTGGTACTACTTTAGATTCGAAGACCCAGTC |
| | CCTACTTATTGTTAATAACGCTACTAATGTTGTTATTAAAGTCTGTGAATTTCAATTTTGTAATGAT |
| | CCATTTTTGGGTGTTTATTACCACAAAAACAACAAAAGTTGGATGGAAAGTGAGTTCAGAGTTTATT |
| | CTAGTGCGAATAATTGCACTTTTGAATATGTCTCTCAGCCTTTTCTTATGGACCTTGAAGGAAAACA |
| | GGGTAATTTCAAAAATCTTAGGGAATTTGTGTTTAAGAATATTGATGGTTATTTTAAAATATATTCT |
| | AAGCACACGCCTATTAATTTAGTGCGTGATCTCCCTCAGGGTTTTTCGGCTTTAGAACCATTGGTAG |
| | ATTTGCCAATAGGTATTAACATCACTAGGTTTCAAACTTTACTTGCTTTACATAGAAGTTATTTGAC |
| | TCCTGGTGATTCTTCTTCAGGTTGGACAGCTGGTGCTGCAGCTTATTATGTGGGTTATCTTCAACCT |
| | AGGACTTTTCTATTAAAATATAATGAAAATGGAACCATTACAGATGCTGTAGACTGTGCACTTGACC |
| | CTCTCTCAGAAACAAAGTGTACGTTGAAATCCTTCACTGTAGAAAAAGGAATCTATCAAACTTCTAA |
| | CTTTAGAGTCCAACCAACAGAATCTATTGTTAGATTTCCTAATATTACAAACTTGTGCCCTTTTGGT |
| | GAAGTTTTTAACGCCACCAGATTTGCATCTGTTTATGCTTGGAACAGGAAGAGAATCAGCAACTGTG |
| | TTGCTGATTATTCTGTCCTATATAATTCCGCATCATTTTCCACTTTTAAGTGTTATGGAGTGTCTCC |
| | TACTAAATTAAATGATCTCTGCTTTACTAATGTCTATGCAGATTCATTTGTAATTAGAGGTGATGAA |
| | GTCAGACAAATCGCTCCAGGGCAAACTGGAAAGATTGCTGATTATAATTATAAATTACCAGATGATT |
| | TTACAGGCTGCGTTATAGCTTGGAATTCTAACAATCTTGATTCTAAGGTTGGTGGTAATTATAATTA |
| | CCTGTATAGATTGTTTAGGAAGTCTAATCTCAAACCTTTTGAGAGAGATATTTCAACTGAAATCTAT |
| | CAGGCCGGTAGCACACCTTGTAATGGTGTTGAAGGTTTTAATTGTTACTTTCCTTTACAATCATATG |
| | GTTTCCAACCCACTAATGGTGTTGGTTACCAACCATACAGAGTAGTAGTACTTTCTTTTGAACTTCT |
| | ACATGCACCAGCAACTGTTTGTGGACCTAAAAAGTCTACTAATTTGGTTAAAAACAAATGTGTCAAT |
| | TTCAACTTCAATGGTTTAACAGGCACAGGTGTTCTTACTGAGTCTAACAAAAAGTTTCTGCCTTTCC |
| | AACAATTTGGCAGAGACATTGCTGACACTACTGATGCTGTCCGTGATCCACAGACACTTGAGATTCT |
| | TGACATTACACCATGTTCTTTTGGTGGTGTCAGTGTTATAACACCAGGAACAAATACTTCTAACCAG |
| | GTTGCTGTTCTTTATCAGGATGTTAACTGCACAGAAGTCCCTGTTGCTATTCATGCAGATCAACTTA |
| | CTCCTACTTGGCGTGTTTATTCTACAGGTTCTAATGTTTTTCAAACACGTGCAGGCTGTTTAATAGG |
| | GGCTGAACATGTCAACAACTCATATGAGTGTGACATACCCATTGGTGCAGGTATATGCGCTAGTTAT |
| | CAGACTCAGACTAATTCTCCTCGGCGGGCACGTAGTGTAGCTAGTCAATCCATCATTGCCTACACTA |
| | TGTCACTTGGTGCAGAAAATTCAGTTGCTTACTCTAATAACTCTATTGCCATACCCACAAATTTTAC |
| | TATTAGTGTTACCACAGAAATTCTACCAGTGTCTATGACCAAGACATCAGTAGATTGTACAATGTAC |
| | ATTTGTGGTGATTCAACTGAATGCAGCAATCTTTTGTTGCAATATGGCAGTTTTTGTACACAATTAA |
| | ACCGTGCTTTAACTGGAATAGCTGTTGAACAAGACAAAAACACCCAAGAAGTTTTTGCACAAGTCAA |
| | ACAAATTTACAAAACACCACCAATTAAAGATTTTGGTGGTTTTAATTTTTCACAAATATTACCAGAT |
| | CCATCAAAACCAAGCAAGAGGTCATTTATTGAAGATCTACTTTTCAACAAAGTGACACTTGCAGATG |
| | CTGGCTTCATCAAACAATATGGTGATTGCCTTGGTGATATTGCTGCTAGAGACCTCATTTGTGCACA |
| | AAAGTTTAACGGCCTTACTGTTTTGCCACCTTTGCTCACAGATGAAATGATTGCTCAATACACTTCT |
| | GCACTGTTAGCGGGTACAATCACTTCTGGTTGGACCTTTGGTGCAGGTGCTGCATTACAAATACCAT |
| | TTGCTATGCAAATGGCTTATAGGTTTAATGGTATTGGAGTTACACAGAATGTTCTCTATGAGAACCA |
| | AAAATTGATTGCCAACCAATTTAATAGTGCTATTGGCAAAATTCAAGACTCACTTTCTTCCACAGCA |
| | AGTGCACTTGGAAAACTTCAAGATGTGGTCAACCAAAATGCACAAGCTTTAAACACGCTTGTTAAAC |
| | AACTTAGCTCCAATTTTGGTGCAATTTCAAGTGTTTTAAATGATATCCTTTCACGTCTTGACAAAGT |
| | TGAGGCTGAAGTGCAAATTGATAGGTTGATCACAGGCAGACTTCAAAGTTTGCAGACATATGTGACT |
| | CAACAATTAATTAGAGCTGCAGAAATCAGAGCTTCTGCTAATCTTGCTGCTACTAAAATGTCAGAGT |
| | GTGTACTTGGACAATCAAAAAGAGTTGATTTTTGTGGAAAGGGCTATCATCTTATGTCCTTCCCTCA |
| | GTCAGCACCTCATGGTGTAGTCTTCTTGCATGTGACTTATGTCCCTGCACAAGAAAAGAACTTCACA |
| | ACTGCTCCTGCCATTTGTCATGATGGAAAAGCACACTTTCCTCGTGAAGGTGTCTTTGTTTCAAATG |
| | GCACACACTGGTTTGTAACACAAAGGAATTTTTATGAACCACAAATCATTACTACAGACAACACATT |
| | TGTGTCTGGTAACTGTGATGTTGTAATAGGAATTGTCAACAACACAGTTTATGATCCTTTGCAACCT |
| | GAATTAGACTCATTCAAGGAGGAGTTAGATAAATATTTTAAGAATCATACATCACCAGATGTTGATT |
| | TAGGTGACATCTCTGGCATTAATGCTTCAGTTGTAAACATTCAAAAAGAAATTGACCGCCTCAATGA |
| | GGTTGCCAAGAATTTAAATGAATCTCTCATCGATCTCCAAGAACTTGGAAAGTATGAGCAGTATATA |
| | AAATGGCCATGGTACATTTGGCTAGGTTTTATAGCTGGCTTGATTGCCATAGTAATGGTGACAATTA |
| | TGCTTTGCTGTATGACCAGTTGCTGTAGTTGTCTCAAGGGCTGTTGTTCTTGTGGATCCTGCTGCAA |
| | ATTTGATGAAGACGACTCTGAGCCAGTGCTCAAAGGAGTCAAATTACATTACACATAAACGAACTTA |
| | TGGATTTGTTTATGAGAATCTTCACAATTGGAACTGTAACTTTGAAGCAAGGTGAAATCAAGGATGC |
| | TACTCCTTCAGATTTTGTTCGCGCTACTGCAACGATACCGATACAAGCCTCACTCCCTTTCGGATGG |
| | CTTATTGTTGGCGTTGCACTTCTTGCTGTTTTTCAGAGCGCTTCCAAAATCATAACCCTCAAAAAGA |
| | GATGGCAACTAGCACTCTCCAAGGGTGTTCACTTTGTTTGCAACTTGCTGTTGTTGTTTGTAACAGT |
| | TTACTCACACCTTTTGCTCGTTGCTGCTGGCCTTGAAGCCCCTTTTCTCTATCTTTATGCTTTAGTC |
| | TACTTCTTGCAGAGTATAAACTTTGTAAGAATAATAATGAGGCTTTGGCTTTGCTGGAAATGCCGTT |
| | CCAAAAACCCATTACTTTATGATGCCAACTATTTTCTTTGCTGGCATACTAATTGTTACGACTATTG |
| | TATACCTTACAATAGTGTAACTTCTTCAATTGTCATTACTTCAGGTGATGGCACAACAAGTCCTATT |
| | TCTGAACATGACTACCAGATTGGTGGTTATACTGAAAAATGGGAATCTGGAGTAAAAGACTGTGTTG |
| | TATTACACAGTTACTTCACTTCAGACTATTACCAGCTGTACTCAACTCAATTGAGTACAGACACTGG |
| | TGTTGAACATGTTACCTTCTTCATCTACAATAAAATTGTTGATGAGCCTGAAGAACATGTCCAAATT |
| | CACACAATCGACGGTTCATCCGGAGTTGTTAATCCAGTAATGGAACCAATTTATGATGAACCGACGA |
| | CGACTACTAGCGTGCCTTTGTAAGCACAAGCTGATGAGTACGAACTTATGTACTCATTCGTTTCGGA |
| | AGAGACAGGTACGTTAATAGTTAATAGCGTACTTCTTTTTCTTGCTTTCGTGGTATTCTTGCTAGTT |
| | ACACTAGCCATCCTTACTGCGCTTCGATTGTGTGCGTACTGCTGCAATATTGTTAACGTGAGTCTTG |
| | TAAAACCTTCTTTTTACGTTTACTCTCGTGTTAAAAATCTGAATTCTTCTAGAGTTCCTGATCTTCT |
| | GGTCTAAACGAACTAAATATTATATTAGTTTTTCTGTTTGGAACTTTAATTTTAGCCATGGCAGATT |
| | CCAACGGTACTATTACCGTTGAAGAGCTTAAAAAGCTCCTTGAACAATGGAACCTAGTAATAGGTTT |
| | CCTATTCCTTACATGGATTTGTCTTCTACAATTTGCCTATGCCAACAGGAATAGGTTTTTGTATATA |
| | ATTAAGTTAATTTTCCTCTGGCTGTTATGGCCAGTAACTTTAGCTTGTTTTGTGCTTGCTGCTGTTT |
| | ACAGAATAAATTGGATCACCGGTGGAATTGCTATCGCAATGGCTTGTCTTGTAGGCTTGATGTGGCT |
| | CAGCTACTTCATTGCTTCTTTCAGACTGTTTGCGCGTACGCGTTCCATGTGGTCATTCAATCCAGAA |
| | ACTAACATTCTTCTCAACGTGCCACTCCATGGCACTATTCTGACCAGACCGCTTCTAGAAAGTGAAC |
| | TCGTAATCGGAGCTGTGATCCTTCGTGGACATCTTCGTATTGCTGGACACCATCTAGGACGCTGTGA |
| | CATCAAGGACCTGCCTAAAGAAATCACTGTTGCTACATCACGAACGCTTTCTTATTACAAATTGGGA |
| | GCTTCGCAGCGTGTAGCAGGTGACTCAGGTTTTGCTGCATACAGTCGCTACAGGATTGGCAACTATA |
| | AATTAAACACAGACCATTCCAGTAGCAGTGACAATATTGCTTTGCTTGTACAGTAAGTGACAACAGA |
| | TGTTTCATCTCGTTGACTTTCAGGTTACTATAGCAGAGATATTACTAATTATTATGAGGACTTTTAA |
| | AGTTTCCATTTGGAATCTTGATTACATCATAAACCTCATAATTAAAAATTTATCTAAGTCACTAACT |
| | GAGAATAAATATTCTCAATTAGATGAAGAGCAACCAATGGAGATTGATTAAACGAACATGAAAATTA |
| | TTCTTTTCTTGGCACTGATAACACTCGCTACTTGTGAGCTTTATCACTACCAAGAGTGTGTTAGAGG |
| | TACAACAGTACTTTTAAAAGAACCTTGCTCTTCTGGAACATACGAGGGCAATTCACCATTTCATCCT |
| | CTAGCTGATAACAAATTTGCACTGACTTGCTTTAGCACTCAATTTGCTTTTGCTTGTCCTGACGGCG |
| | TAAAACACGTCTATCAGTTACGTGCCAGATCAGTTTCACCTAAACTGTTCATCAGACAAGAGGAAGT |
| | TCAAGAACTTTACTCTCCAATTTTTCTTATTGTTGCGGCAATAGTGTTTATAACACTTTGCTTCACA |
| | CTCAAAAGAAAGACAGAATGATTGAACTTTCATTAATTGACTTCTATTTGTGCTTTTTAGCCTTTCT |
| | GCTATTCCTTGTTTTAATTATGCTTATTATCTTTTGGTTCTCACTTGAACTGCAAGATCATAATGAA |
| | ACTTGTCACGCCTAAACGAACATGAAATTTCTTGTTTTCTTAGGAATCATCACAACTGTAGCTGCAT |
| | TTCACCAAGAATGTAGTTTACAGTCATGTACTCAACATCAACCATATGTAGTTGATGACCCGTGTCC |
| | TATTCACTTCTATTCTAAATGGTATATTAGAGTAGGAGCTAGAAAATCAGCACCTTTAATTGAATTG |
| | TGCGTGGATGAGGCTGGTTCTAAATCACCCATTCAGTACATCGATATCGGTAATTATACAGTTTCCT |
| | GTTTACCTTTTACAATTAATTGCCAGGAACCTAAATTGGGTAGTCTTGTAGTGCGTTGTTCGTTCTA |
| | TGAAGACTTTTTAGAGTATCATGACGTTCGTGTTGTTTTAGATTTCATCTAAACGAACAAACTAAAA |
| | TGTCTGATAATGGACCCCAAAATCAGCGAAATGCACCCCGCATTACGTTTGGTGGACCCTCAGATTC |
| | AACTGGCAGTAACCAGAATGGAGAACGCAGTGGGGCGCGATCAAAACAACGTCGGCCCCAAGGTTTA |
| | CCCAATAATACTGCGTCTTGGTTCACCGCTCTCACTCAACATGGCAAGGAAGACCTTAAATTCCCTC |
| | GAGGACAAGGCGTTCCAATTAACACCAATAGCAGTCCAGATGACCAAATTGGCTACTACCGAAGAGC |
| | TACCAGACGAATTCGTGGTGGTGACGGTAAAATGAAAGATCTCAGTCCAAGATGGTATTTCTACTAC |
| | CTAGGAACTGGGCCAGAAGCTGGACTTCCCTATGGTGCTAACAAAGACGGCATCATATGGGTTGCAA |
| | CTGAGGGAGCCTTGAATACACCAAAAGATCACATTGGCACCCGCAATCCTGCTAACAATGCTGCAAT |
| | CGTGCTACAACTTCCTCAAGGAACAACATTGCCAAAAGGCTTCTACGCAGAAGGGAGCAGAGGCGGC |
| | AGTCAAGCCTCTTCTCGTTCCTCATCACGTAGTCGCAACAGTTCAAGAAATTCAACTCCAGGCAGCA |
| | GTAGGGGAACTTCTCCTGCTAGAATGGCTGGCAATGGCGGTGATGCTGCTCTTGCTTTGCTGCTGCT |
| | TGACAGATTGAACCAGCTTGAGAGCAAAATGTCTGGTAAAGGCCAACAACAACAAGGCCAAACTGTC |
| | ACTAAGAAATCTGCTGCTGAGGCTTCTAAGAAGCCTCGGCAAAAACGTACTGCCACTAAAGCATACA |
| | ATGTAACACAAGCTTTCGGCAGACGTGGTCCAGAACAAACCCAAGGAAATTTTGGGGACCAGGAACT |
| | AATCAGACAAGGAACTGATTACAAACATTGGCCGCAAATTGCACAATTTGCCCCCAGCGCTTCAGCG |
| | TTCTTCGGAATGTCGCGCATTGGCATGGAAGTCACACCTTCGGGAACGTGGTTGACCTACACAGGTG |
| | CCATCAAATTGGATGACAAAGATCCAAATTTCAAAGATCAAGTCATTTTGCTGAATAAGCATATTGA |
| | CGCATACAAAACATTCCCACCAACAGAGCCTAAAAAGGACAAAAAGAAGAAGGCTGATGAAACTCAA |
| | GCCTTACCGCAGAGACAGAAGAAACAGCAAACTGTGACTCTTCTTCCTGCTGCAGATTTGGATGATT |
| | TCTCCAAACAATTGCAACAATCCATGAGCAGTGCTGACTCAACTCAGGCCTAAACTCATGCAGACCA |
| | CACAAGGCAGATGGGCTATATAAACGTTTTCGCTTTTCCGTTTACGATATATAGTCTACTCTTGTGC |
| | AGAATGAATTCTCGTAACTACATAGCACAAGTAGATGTAGTTAACTTTAATCTCACATAGCAATCTT |
| | TAATCAGTGTGTAACATTAGGGAGGACTTGAAAGAGCCACCACATTTTCACCGAGGCCACGCGGAGT |
| | ACGATCGAGTGTACAGTGAACAATGCTAGGGAGAGCTGCCTATATGGAAGAGCCCTAATGTGTAAAA |
| | TTAATTTTAGTAGTGCTATCCCCATGTGATTTTAATAGCTTCTTAGGAGAATGACAAAAAAAAAAAA |
| | AAAAAAAAAAAAAAAAAAAAA |
| 250 | Reverse Complement of GenBank accession no. NC_045512 (Severe acute respiratory |
| | syndrome coronavirus 2 isolate Wuhan-Hu-1, complete genome) |
| | TTTTTTTTTTTTTTTTTTTTTTTTTTTTTTTTTGTCATTCTCCTAAGAAGCTATTAAAATCACATGG |
| | GGATAGCACTACTAAAATTAATTTTACACATTAGGGCTCTTCCATATAGGCAGCTCTCCCTAGCATT |
| | GTTCACTGTACACTCGATCGTACTCCGCGTGGCCTCGGTGAAAATGTGGTGGCTCTTTCAAGTCCTC |
| | CCTAATGTTACACACTGATTAAAGATTGCTATGTGAGATTAAAGTTAACTACATCTACTTGTGCTAT |
| | GTAGTTAGGAGAATTCATTCTGCACAAGAGTAGACTATATATCGTAAACGGAAAAGCGAAAACGTTT |
| | ATATAGCCCATCTGCCTTGTGTGGTCTGCATGAGTTTAGGCCTGAGTTGAGTCAGCACTGCTCATGG |
| | ATTGTTGCAATTGTTTGGAGAAATCATCCAAATCTGCAGCAGGAAGAAGAGTCACAGTTTGCTGTTT |
| | CTTCTGTCTCTGCGGTAAGGCTTGAGTTTCATCAGCCTTCTTCTTTTTGTCCTTTTTAGGCTCTGTT |
| | GGTGGGAATGTTTTGTATGCGTCAATATGCTTATTCAGCAAAATGACTTGATCTTTGAAATTTGGAT |
| | CTTTGTCATCCAATTTGATGGCACCTGTGTAGGTCAACCACGTTCCCGAAGGTGTGACTTCCATGCC |
| | AATGCGCGACATTCCGAAGAACGCTGAAGCGCTGGGGGCAAATTGTGCAATTTGCGGCCAATGTTTG |
| | TAATCAGTTCCTTGTCTGATTAGTTCCTGGTCCCCAAAATTTCCTTGGGTTTGTTCTGGACCACGTC |
| | TGCCGAAAGCTTGTGTTACATTGTATGCTTTAGTGGCAGTACGTTTTTGCCGAGGCTTCTTAGAAGC |
| | CTCAGCAGCAGATTTCTTAGTGACAGTTTGGCCTTGTTGTTGTTGGCCTTTACCAGACATTTTGCTC |
| | TCAAGCTGGTTCAATCTGTCAAGCAGCAGCAAAGCAAGAGCAGCATCACCGCCATTGCCAGCCATTC |
| | TAGCAGGAGAAGTTCCCCTACTGCTGCCTGGAGTTGAATTTCTTGAACTGTTGCGACTACGTGATGA |
| | GGAACGAGAAGAGGCTTGACTGCCGCCTCTGCTCCCTTCTGCGTAGAAGCCTTTTGGCAATGTTGTT |
| | CCTTGAGGAAGTTGTAGCACGATTGCAGCATTGTTAGCAGGATTGCGGGTGCCAATGTGATCTTTTG |
| | GTGTATTCAAGGCTCCCTCAGTTGCAACCCATATGATGCCGTCTTTGTTAGCACCATAGGGAAGTCC |
| | AGCTTCTGGCCCAGTTCCTAGGTAGTAGAAATACCATCTTGGACTGAGATCTTTCATTTTACCGTCA |
| | CCACCACGAATTCGTCTGGTAGCTCTTCGGTAGTAGCCAATTTGGTCATCTGGACTGCTATTGGTGT |
| | TAATTGGAACGCCTTGTCCTCGAGGGAATTTAAGGTCTTCCTTGCCATGTTGAGTGAGAGCGGTGAA |
| | CCAAGACGCAGTATTATTGGGTAAACCTTGGGGCCGACGTTGTTTTGATCGCGCCCCACTGCGTTCT |
| | CCATTCTGGTTACTGCCAGTTGAATCTGAGGGTCCACCAAACGTAATGCGGGGTGCATTTCGCTGAT |
| | TTTGGGGTCCATTATCAGACATTTTAGTTTGTTCGTTTAGATGAAATCTAAAACAACACGAACGTCA |
| | TGATACTCTAAAAAGTCTTCATAGAACGAACAACGCACTACAAGACTACCCAATTTAGGTTCCTGGC |
| | AATTAATTGTAAAAGGTAAACAGGAAACTGTATAATTACCGATATCGATGTACTGAATGGGTGATTT |
| | AGAACCAGCCTCATCCACGCACAATTCAATTAAAGGTGCTGATTTTCTAGCTCCTACTCTAATATAC |
| | CATTTAGAATAGAAGTGAATAGGACACGGGTCATCAACTACATATGGTTGATGTTGAGTACATGACT |
| | GTAAACTACATTCTTGGTGAAATGCAGCTACAGTTGTGATGATTCCTAAGAAAACAAGAAATTTCAT |
| | GTTCGTTTAGGCGTGACAAGTTTCATTATGATCTTGCAGTTCAAGTGAGAACCAAAAGATAATAAGC |
| | ATAATTAAAACAAGGAATAGCAGAAAGGCTAAAAAGCACAAATAGAAGTCAATTAATGAAAGTTCAA |
| | TCATTCTGTCTTTCTTTTGAGTGTGAAGCAAAGTGTTATAAACACTATTGCCGCAACAATAAGAAAA |
| | ATTGGAGAGTAAAGTTCTTGAACTTCCTCTTGTCTGATGAACAGTTTAGGTGAAACTGATCTGGCAC |
| | GTAACTGATAGACGTGTTTTACGCCGTCAGGACAAGCAAAAGCAAATTGAGTGCTAAAGCAAGTCAG |
| | TGCAAATTTGTTATCAGCTAGAGGATGAAATGGTGAATTGCCCTCGTATGTTCCAGAAGAGCAAGGT |
| | TCTTTTAAAAGTACTGTTGTACCTCTAACACACTCTTGGTAGTGATAAAGCTCACAAGTAGCGAGTG |
| | TTATCAGTGCCAAGAAAAGAATAATTTTCATGTTCGTTTAATCAATCTCCATTGGTTGCTCTTCATC |
| | TAATTGAGAATATTTATTCTCAGTTAGTGACTTAGATAAATTTTTAATTATGAGGTTTATGATGTAA |
| | TCAAGATTCCAAATGGAAACTTTAAAAGTCCTCATAATAATTAGTAATATCTCTGCTATAGTAACCT |
| | GAAAGTCAACGAGATGAAACATCTGTTGTCACTTACTGTACAAGCAAAGCAATATTGTCACTGCTAC |
| | TGGAATGGTCTGTGTTTAATTTATAGTTGCCAATCCTGTAGCGACTGTATGCAGCAAAACCTGAGTC |
| | ACCTGCTACACGCTGCGAAGCTCCCAATTTGTAATAAGAAAGCGTTCGTGATGTAGCAACAGTGATT |
| | TCTTTAGGCAGGTCCTTGATGTCACAGCGTCCTAGATGGTGTCCAGCAATACGAAGATGTCCACGAA |
| | GGATCACAGCTCCGATTACGAGTTCACTTTCTAGAAGCGGTCTGGTCAGAATAGTGCCATGGAGTGG |
| | CACGTTGAGAAGAATGTTAGTTTCTGGATTGAATGACCACATGGAACGCGTACGCGCAAACAGTCTG |
| | AAAGAAGCAATGAAGTAGCTGAGCCACATCAAGCCTACAAGACAAGCCATTGCGATAGCAATTCCAC |
| | CGGTGATCCAATTTATTCTGTAAACAGCAGCAAGCACAAAACAAGCTAAAGTTACTGGCCATAACAG |
| | CCAGAGGAAAATTAACTTAATTATATACAAAAACCTATTCCTGTTGGCATAGGCAAATTGTAGAAGA |
| | CAAATCCATGTAAGGAATAGGAAACCTATTACTAGGTTCCATTGTTCAAGGAGCTTTTTAAGCTCTT |
| | CAACGGTAATAGTACCGTTGGAATCTGCCATGGCTAAAATTAAAGTTCCAAACAGAAAAACTAATAT |
| | AATATTTAGTTCGTTTAGACCAGAAGATCAGGAACTCTAGAAGAATTCAGATTTTTAACACGAGAGT |
| | AAACGTAAAAAGAAGGTTTTACAAGACTCACGTTAACAATATTGCAGCAGTACGCACACAATCGAAG |
| | CGCAGTAAGGATGGCTAGTGTAACTAGCAAGAATACCACGAAAGCAAGAAAAAGAAGTACGCTATTA |
| | ACTATTAACGTACCTGTCTCTTCCGAAACGAATGAGTACATAAGTTCGTACTCATCAGCTTGTGCTT |
| | ACAAAGGCACGCTAGTAGTCGTCGTCGGTTCATCATAAATTGGTTCCATTACTGGATTAACAACTCC |
| | GGATGAACCGTCGATTGTGTGAATTTGGACATGTTCTTCAGGCTCATCAACAATTTTATTGTAGATG |
| | AAGAAGGTAACATGTTCAACACCAGTGTCTGTACTCAATTGAGTTGAGTACAGCTGGTAATAGTCTG |
| | AAGTGAAGTAACTGTGTAATACAACACAGTCTTTTACTCCAGATTCCCATTTTTCAGTATAACCACC |
| | AATCTGGTAGTCATGTTCAGAAATAGGACTTGTTGTGCCATCACCTGAAGTAATGACAATTGAAGAA |
| | GTTACACTATTGTAAGGTATACAATAGTCGTAACAATTAGTATGCCAGCAAAGAAAATAGTTGGCAT |
| | CATAAAGTAATGGGTTTTTGGAACGGCATTTCCAGCAAAGCCAAAGCCTCATTATTATTCTTACAAA |
| | GTTTATACTCTGCAAGAAGTAGACTAAAGCATAAAGATAGAGAAAAGGGGCTTCAAGGCCAGCAGCA |
| | ACGAGCAAAAGGTGTGAGTAAACTGTTACAAACAACAACAGCAAGTTGCAAACAAAGTGAACACCCT |
| | TGGAGAGTGCTAGTTGCCATCTCTTTTTGAGGGTTATGATTTTGGAAGCGCTCTGAAAAACAGCAAG |
| | AAGTGCAACGCCAACAATAAGCCATCCGAAAGGGAGTGAGGCTTGTATCGGTATCGTTGCAGTAGCG |
| | CGAACAAAATCTGAAGGAGTAGCATCCTTGATTTCACCTTGCTTCAAAGTTACAGTTCCAATTGTGA |
| | AGATTCTCATAAACAAATCCATAAGTTCGTTTATGTGTAATGTAATTTGACTCCTTTGAGCACTGGC |
| | TCAGAGTCGTCTTCATCAAATTTGCAGCAGGATCCACAAGAACAACAGCCCTTGAGACAACTACAGC |
| | AACTGGTCATACAGCAAAGCATAATTGTCACCATTACTATGGCAATCAAGCCAGCTATAAAACCTAG |
| | CCAAATGTACCATGGCCATTTTATATACTGCTCATACTTTCCAAGTTCTTGGAGATCGATGAGAGAT |
| | TCATTTAAATTCTTGGCAACCTCATTGAGGCGGTCAATTTCTTTTTGAATGTTTACAACTGAAGCAT |
| | TAATGCCAGAGATGTCACCTAAATCAACATCTGGTGATGTATGATTCTTAAAATATTTATCTAACTC |
| | CTCCTTGAATGAGTCTAATTCAGGTTGCAAAGGATCATAAACTGTGTTGTTGACAATTCCTATTACA |
| | ACATCACAGTTAGCAGACACAAATGTGTTGTCTGTAGTAATGATTTGTGGTTCATAAAAATTCCTTT |
| | GTGTTACAAACCAGTGTGTGCCATTTGAAACAAAGACACCTTCACGAGGAAAGTGTGCTTTTCCATC |
| | ATGACAAATGGCAGGAGCAGTTGTGAAGTTCTTTTCTTGTGCAGGGACATAAGTCACATGCAAGAAG |
| | ACTACACCATGAGGTGCTGACTGAGGGAAGGACATAAGATGATAGCCCTTTCCACAAAAATCAACTC |
| | TTTTTGATTGTCCAAGTACACACTCTGACATTTTAGTAGCAGCAAGATTAGCAGAAGCTCTGATTTC |
| | TGCAGCTCTAATTAATTGTTGAGTCACATATGTCTGCAAACTTTGAAGTCTGCCTGTGATCAACCTA |
| | TCAATTTGCACTTCAGCCTCAACTTTGTCAAGACGTGAAAGGATATCATTTAAAACACTTGAAATTG |
| | CACCAAAATTGGAGCTAAGTTGTTTAACAAGCGTGTTTAAAGCTTGTGCATTTTGGTTGACCACATC |
| | TTGAAGTTTTCCAAGTGCACTTGCTGTGGAAGAAAGTGAGTCTTGAATTTTGCCAATAGCACTATTA |
| | AATTGGTTGGCAATCAATTTTTGGTTCTCATAGAGAACATTCTGTGTAACTCCAATACCATTAAACC |
| | TATAAGCCATTTGCATAGCAAATGGTATTTGTAATGCAGCACCTGCACCAAAGGTCCAACCAGAAGT |
| | GATTGTACCCGCTAACAGTGCAGAAGTGTATTGAGCAATCATTTCATCTGTGAGCAAAGGTGGCAAA |
| | ACAGTAAGGCCGTTAAACTTTTGTGCACAAATGAGGTCTCTAGCAGCAATATCACCAAGGCAATCAC |
| | CATATTGTTTGATGAAGCCAGCATCTGCAAGTGTCACTTTGTTGAAAAGTAGATCTTCAATAAATGA |
| | CCTCTTGCTTGGTTTTGATGGATCTGGTAATATTTGTGAAAAATTAAAACCACCAAAATCTTTAATT |
| | GGTGGTGTTTTGTAAATTTGTTTGACTTGTGCAAAAACTTCTTGGGTGTTTTTGTCTTGTTCAACAG |
| | CTATTCCAGTTAAAGCACGGTTTAATTGTGTACAAAAACTGCCATATTGCAACAAAAGATTGCTGCA |
| | TTCAGTTGAATCACCACAAATGTACATTGTACAATCTACTGATGTCTTGGTCATAGACACTGGTAGA |
| | ATTTCTGTGGTAACACTAATAGTAAAATTTGTGGGTATGGCAATAGAGTTATTAGAGTAAGCAACTG |
| | AATTTTCTGCACCAAGTGACATAGTGTAGGCAATGATGGATTGACTAGCTACACTACGTGCCCGCCG |
| | AGGAGAATTAGTCTGAGTCTGATAACTAGCGCATATACCTGCACCAATGGGTATGTCACACTCATAT |
| | GAGTTGTTGACATGTTCAGCCCCTATTAAACAGCCTGCACGTGTTTGAAAAACATTAGAACCTGTAG |
| | AATAAACACGCCAAGTAGGAGTAAGTTGATCTGCATGAATAGCAACAGGGACTTCTGTGCAGTTAAC |
| | ATCCTGATAAAGAACAGCAACCTGGTTAGAAGTATTTGTTCCTGGTGTTATAACACTGACACCACCA |
| | AAAGAACATGGTGTAATGTCAAGAATCTCAAGTGTCTGTGGATCACGGACAGCATCAGTAGTGTCAG |
| | CAATGTCTCTGCCAAATTGTTGGAAAGGCAGAAACTTTTTGTTAGACTCAGTAAGAACACCTGTGCC |
| | TGTTAAACCATTGAAGTTGAAATTGACACATTTGTTTTTAACCAAATTAGTAGACTTTTTAGGTCCA |
| | CAAACAGTTGCTGGTGCATGTAGAAGTTCAAAAGAAAGTACTACTACTCTGTATGGTTGGTAACCAA |
| | CACCATTAGTGGGTTGGAAACCATATGATTGTAAAGGAAAGTAACAATTAAAACCTTCAACACCATT |
| | ACAAGGTGTGCTACCGGCCTGATAGATTTCAGTTGAAATATCTCTCTCAAAAGGTTTGAGATTAGAC |
| | TTCCTAAACAATCTATACAGGTAATTATAATTACCACCAACCTTAGAATCAAGATTGTTAGAATTCC |
| | AAGCTATAACGCAGCCTGTAAAATCATCTGGTAATTTATAATTATAATCAGCAATCTTTCCAGTTTG |
| | CCCTGGAGCGATTTGTCTGACTTCATCACCTCTAATTACAAATGAATCTGCATAGACATTAGTAAAG |
| | CAGAGATCATTTAATTTAGTAGGAGACACTCCATAACACTTAAAAGTGGAAAATGATGCGGAATTAT |
| | ATAGGACAGAATAATCAGCAACACAGTTGCTGATTCTCTTCCTGTTCCAAGCATAAACAGATGCAAA |
| | TCTGGTGGCGTTAAAAACTTCACCAAAAGGGCACAAGTTTGTAATATTAGGAAATCTAACAATAGAT |
| | TCTGTTGGTTGGACTCTAAAGTTAGAAGTTTGATAGATTCCTTTTTCTACAGTGAAGGATTTCAACG |
| | TACACTTTGTTTCTGAGAGAGGGTCAAGTGCACAGTCTACAGCATCTGTAATGGTTCCATTTTCATT |
| | ATATTTTAATAGAAAAGTCCTAGGTTGAAGATAACCCACATAATAAGCTGCAGCACCAGCTGTCCAA |
| | CCTGAAGAAGAATCACCAGGAGTCAAATAACTTCTATGTAAAGCAAGTAAAGTTTGAAACCTAGTGA |
| | TGTTAATACCTATTGGCAAATCTACCAATGGTTCTAAAGCCGAAAAACCCTGAGGGAGATCACGCAC |
| | TAAATTAATAGGCGTGTGCTTAGAATATATTTTAAAATAACCATCAATATTCTTAAACACAAATTCC |
| | CTAAGATTTTTGAAATTACCCTGTTTTCCTTCAAGGTCCATAAGAAAAGGCTGAGAGACATATTCAA |
| | AAGTGCAATTATTCGCACTAGAATAAACTCTGAACTCACTTTCCATCCAACTTTTGTTGTTTTTGTG |
| | GTAATAAACACCCAAAAATGGATCATTACAAAATTGAAATTCACAGACTTTAATAACAACATTAGTA |
| | GCGTTATTAACAATAAGTAGGGACTGGGTCTTCGAATCTAAAGTAGTACCAAAAATCCAGCCTCTTA |
| | TTATGTTAGACTTCTCAGTGGAAGCAAAATAAACACCATCATTAAATGGTAGGACAGGGTTATCAAA |
| | CCTCTTAGTACCATTGGTCCCAGAGACATGTATAGCATGGAACCAAGTAACATTGGAAAAGAAAGGT |
| | AAGAACAAGTCCTGAGTTGAATGTAAAACTGAGGATCTGAAAACTTTGTCAGGGTAATAAACACCAC |
| | GTGTGAAAGAATTAGTGTATGCAGGGGGTAATTGAGTTCTGGTTGTAAGATTAACACACTGACTAGA |
| | GACTAGTGGCAATAAAACAAGAAAAACAAACATTGTTCGTTTAGTTGTTAACAAGAACATGAGTAGA |
| | AATAACAACTCTGTTGTTTTCTCTAATTATAAGTCTACCTTTACTAAGAAGAGATAAAATCATATCA |
| | TTGATTTGACCTTCTTTTAAAGACATAACAGCAGTACCCCTTAATTTAAGGGGAAATTTACTCATGT |
| | CAAATAAAGAATAGGAAGACAACTGAATTGGATTTGTATTCCTCCAAAATATGTAATTTGCATGCAT |
| | GACATAACCATCTATTTGTTCGCGTGGTTTGCCAAGATAATTACATCCAATTAAAAATGCTTCAGAT |
| | GATGACGCATTCACATTAGTAACAAAGGCTGTCCACCATGCGAAGTGTCCCATGAGCTTATAAAGAT |
| | CAGCATTCCAAGAATGTTCTGTTATCTTTATAGCCACGGAACCTCCAAGAGCTAGCTTTTGTTGTAT |
| | AAACCCACAAATGTAAGTGAAAAAACCCTCTTTAGAGTCATTTTCTTTTGTAACATTTTTAGTCTTA |
| | GGGTCGTACATATCACTAATAATGAGATCCCATTTATTAGCTGTATGTACAGTTGCACAATCACCAA |
| | TCAAAGTTGAATCTGCATCAGAGACAAAGTCATTAAGATCTGAATCGACAAGCAGCGTACCCGTAGG |
| | CAACCACTGTCTTAAAACAGCTGTACCTGGTGCAACTCCTTTATCAGAACCAGCACCAAAATGTATA |
| | ACTCTCATATTATAGGGTACAGCTAATGTTAATGTGTTTAAATATTGACACAGTTGAGTATATTTTG |
| | CGACATTCATCATTATGCCTTTAGGTAATGTTGCACTATCACCATAATTTTGAAGGTCACACTTTTC |
| | TAATAGCATTCTTTGCATTTTGTAAAGATTAGGCATAGCAACACCCGGTTGCCACGCTTGACTAGAT |
| | TGTAATTTTGGGTAAAATGTTTCTACATGGCCATCTTTACACCAAAGCATAAATGAAATTTCTGTAT |
| | AGTCAATAGTCACTTTGACAACCTTAGAAACTACAGATAAATCTTGGGATTTTATTATTTCAACAAA |
| | ATCATCAAGTAATAAATCAATAACAGAACACACACACTTAGATGAACCTGTTTGCGCATCTGTTATG |
| | AAATAGTTTTTAACTGTACTGTCCATAGGAATAAAATCTTCTAATTCAAAAGGTGATTCCTTAAAAC |
| | GTTTAGCTAGTCCAATCAGTAGATGTAAACCACCTAACTGACTATGACTAAAATCTCCATAAACGAT |
| | ATGTTCGAAGGCATAGCCTTCTAATTTATACCGTTCAATGAATTCATCCATAGCTAATTCTAAGAAA |
| | TCAATTTCCATTTGACTCCTGGGTTTAAATTCTTGTAAATTTCTACTCTGAGTAAAGTAAGTTTCAG |
| | GTAATTGTTGGACAACACCATCAACTTTCTTATAATAATTGAACTGTGTTTTTACGGCTTCTCCAAT |
| | TAATGTGACTCCATTAAGACTAGCTTGTTTGGGACCTACAGATGGTTGTAAACCTTTAACACTACCT |
| | TCTGTAATAAGAACACCATTACGGGCATTTCTAAATAAGTCTACTTGACCATCAACTCTACCATCAA |
| | AAAAGACAGTGAGTGGTGCACAAATCGTTTCAGTTGGTTTCTTGGCTATGTCAGTCATAGAACAAAC |
| | ACCAATAGTAGATATATGTGCTGGAGCATCTCTTTTGTAGTCCCAGATCACAGTATTAGCAGCAATG |
| | TCCACACCCAAATTATTGAGTATTTTCACCTCTGGTACTGGTTTAATGTTGCGCTTAGCCCAAAGCT |
| | CAAATGCTACATTAACAGGTAATGTTGTTTTATTTTCAAACAATTCTACATCAACACCATCAACTTT |
| | TGTGTAAACAGTGTTATTAATGATAGAAACTGGTACTTCACCCTGTTGTCCATCAAAGTGTCCCTTA |
| | TTTACAACATTAAAAGCCACATTTTCTAAACTCTGAAGTCTTGTAAAAGTGTTCCAGAGGTTATAAG |
| | TATCAAATTGTTTGTAAACCCACAAGCTAAAGCCAGCTGAGATCATCATGTTATAAGCATCGAGATA |
| | CAATCTGTACTCATTAGCATGATGTCTACAGACAGCACCACCTAAATTGCAACGTGTTATACACGTA |
| | GCAGACTTTAGTGGTACATAATCTATATCTGACACTACTTGTTTTCCATGAGACTCACATGGACTGT |
| | CAGAGTAATAGAAAAATGGTAATTGTTTTAAATTAACAAAAGCACTTTTATCAAAAGCTGGTGTGTG |
| | GAATGCATGTTTATTTACATACAAACTGCCACCATCACAACCAGGCAAGTTAAGGTTAGATAGCACT |
| | CTAGTGTCAAATCTACAAACAATGGAATTAGCAGGATATCTATCGACATTGCAATTCCAAAATAGGC |
| | ATACACCATCTGTGAATTTGTCAGAATGTGTGGCATAAGAATAGAATAATTCTTCTATTTTATAAGC |
| | TTTGTCACTACAAGGCTGTGCATCATAGAACTTCCATTCTACATCAGCTTGAGGTACACACTTAATA |
| | GCTTTAGGGTTACCAATGTCGTGAAGAACTGGGAATTTGTCTGCTAATAATGCAGCTTTAACAACCA |
| | TGTGTTGAACCTTTCTACAAGCCGCATTAATCTTCAGTTCATCACCAATTATAGGATATTCAATAGT |
| | CCAGTCAACACGCTTAACAAAGCACTCGTGGACAGCTAGACACCTAGTCATGATTGCATCACAACTA |
| | GCTACATGTGCATTACCATGGACTTGACAATACAGATCATGGTTGCTTTGTAGGTTACCTGTAAAAC |
| | CCCATTGTTGAACATCAATCATAAACGGATTATAGACGTAATCAAATCCAATAGAATGATGCCAACA |
| | GGCATAAGTGTCTGAAGCAGTGGAAAAGCATGTGGCACGTCTATCACATAGACAACAGGTGCGCTCA |
| | GGTCCTATTTTCACAAAATACTTCATAGATGTCAACTCAAAGCCATGTGCCCATAAGACAAATACGA |
| | CTCTGTCAGAGAGATTTTTAAGTGTGTCACTTAACATTTGTACAATCTTTATACGCACTACATTCCA |
| | AGGAAGTCCTTTGTACATAAGTGGTATGAGGTGTTTAAATTGATCTCCAGGCGGTGGTTTAGCACTA |
| | ACTCTGGAAAAATCTGTATTATTAGGTGTATCAACATAACCTGTAGGTACAGCAACTAGGTTAACAC |
| | CTGTAGAAAAACCTAGCTGTAAAGGTAAATTGGTACCAACAGCTTCTCTAGTAGCATGACACCCCTC |
| | GACATCGAAGCCAATCCATGCACGTACATGTCTTATAGCTTCTTCGCGGGTGATAAACATGTTAGGG |
| | TAACCATTAACTTGATAATTCATTTTAAAACCCATCATAGAGATGAGTCTTCTATAGGTCATGTCCT |
| | TAGGTATGCCAGGTATGTCAACACATAAACCTTCAGTTTTGAATTTAGTGTCAACACTGAGGTGTGT |
| | AGGTGCCTGTGTAGGATGTAACCCAGTGATTACCTTACTACAATCTTTAAAGAGTCCTGTTACATTT |
| | TCAGCTTGTAAAGTTGCCACATTCCTACGTGGAATTTCAAGACTTGTAAATTGCAACTTGTCATAAA |
| | GGTCTCTATCAGACATTATGCAAAGTATGCCTACTTTTGCTCTGGTAATAGCAACATTAAATCTGTT |
| | TACATTACAAGAGTGAGCTGTTTCAGTGGTTTGAGTGAATATGACATAGTCATATTCTGAGCCCTGT |
| | GATGAATCAACAGTTTGAGTTGGTAGTCCCAAAATCTTTGAGGCTACAGCATTCTGTGAATTATAAG |
| | GTGAAATAAAGACAGCTTTTCTCCAAGCAGGGTTACGTGTAAGGAATTCTCTTACCACGCCTATTTG |
| | TGGCCTGTTAATTGCAGATGAAACATCATGCGTGATAACACCCTTATAAAACATTTTAAAGCATTGA |
| | GCTGATTTGTCTTTATGTGCTTTAAGCTTATTATCATAAACCAAAGCACTCACAGTGTCAACAATTT |
| | CAGCAGGACAACGCCGACAAGTTCCGAGGAACATGTCTGGACCTATAGTTTTCATAAGTCTACACAC |
| | TGAATTGAAATATTCTGGTTCTAGTGTGCCCTTAGTTAGCAATGTGCGTGGTGCAGGTAATTGAGCA |
| | GGGTCGCCAATGTACACATAGTGCTTAGCACGTAATCTGGCATTGACAACACTCAAATCATAATTTG |
| | TGGCCATTGAAATTTCATCAAAGACAACTATATCTGCTGTCGTCTCAGGCAATGCATTTACAGTACA |
| | AAAGACATACTGTTCTAATGTTGAATTCACTTTGAATTTATCAAAACACTCTACACGAGCACGTGCA |
| | GGTATAATTCTACTACATTTATCTATAGGCAAATATTTTAATGCCTTCTCACATAGTGCATCAACAG |
| | CGGCATGAGAGCAAGCTGTATACACTATGCGAGCAGAAGGGTAGTAGAGAGCTAGGCCAATAGCAAA |
| | ATGACTCTTACCAGTACCAGGTGGTCCCTGGAGTGTAGAATACTTTTGCATACCAACCTTTTGATAA |
| | TTTGCAACATTGCTAGAAAACTCATCTGAGATATTGAGTGTTGGGTATAAGCCAGTAATTCTAACAT |
| | AGTGCTCTTGTGGCACTAGTGTAGGTGCACTTAATGGCATTACTGTATGTGATGTCAGCACAAAATA |
| | ATCACCAACATTTAATTTGTAAGTTGTTGTACCTCGGTAAACAACAGCATCACCATAGTCACCTTTT |
| | TCAAAGGTGTACTCTCCTATTTGTACTTTACTGTTTTTAGTTACACGATAACCAGTAAAGACATAAT |
| | TTCGGTTAAGTGGTGGTCTAGGTTTACCAACTTCCCATGAAAGATGTAATTCTCTGTCAGACAGCAC |
| | TTCACGTACAGTAGCAATACCATAAGACAGTTTAAATGTCTCCTCAGTAGCTTTGAGCGTTTCTGCT |
| | GCAAAAAGCTTGAGTCTTTCAGTACAGGTGTTAGCTAAAATGTAATCACCAGCATTTGTCCAGTCAC |
| | ATGTTGCAATTGCATTAAAGTCAGTAACATTATCGCTACCAACACATGTATTTTTATATAAACCAAA |
| | AACTTGTCCATTAGCACACAATGGAAAACTAATGGGTGGTTTATGTGATTTACAATAATAGCTCATA |
| | CCTCCTAAGTAAAGTTGAGTCACATCTGTGACATCACAACCTGGAGCATTGCAAACATACGGATTAA |
| | CAGACAAGACTAATTTATGTGATGTTGATATGACATGGTCGTAACAGCATTTACAACATAAGAATGG |
| | TCTACGTATGCAAGCACCACATCTTAATGAAGTCTGTGAATTGCAAAGAACACAAGCCCCAACAGCC |
| | TGTAAGACTGTATGCGGTGTGTACATAGCCTCATAAAACTCAGGTTCCCAATACCTTGAAGTGTTAT |
| | CATTAGTAAGCATAACAGAATACATGTCTAACATGTGTCCTGTTAACTCATCATGTAGCTTTCTTAT |
| | GTATTGTAAGTACAAATGAAAGACATCAGCATACTCCTGATTAGGATGTTTAGTAAGTGGGTAAGCA |
| | TCTATAGCTAAAGACACGAACCGTTCAATCATAAGTGTACCATCTGTTTTTACGATATCATCTACAA |
| | AACAGCCGGCCCCTAGGATTCTTGATGGATCTGGGTAAGGAAGGTACACATAATCATCACCCTGTTT |
| | AACTAGCATTGTATGTTGAGAGCAAAATTCATGAGGTCCTTTAGTAAGGTCAGTCTCAGTCCAACAT |
| | TTTGCTTCAGACATAAAAACATTGTTTTGATAATAAAGAACTGACTTAAAGTTCTTTATGCTAGCCA |
| | CTAGACCTTGAGATGCATAAGTGCTATTGAAACACACAACAGCATCGTCAGAGAGTATCATCATTGA |
| | GAAATGTTTACGCAAATATGCGTAAAACTCATTCACAAAGTCTGTGTCAACATCTCTATTTCTATAG |
| | AGACACTCATAAAGTCTGTGTTGTAAATTGCGGACATACTTATCGGCAATTTTGTTACCATCAGTAG |
| | ATAAAAGTGCATTAACATTGGCCGTGACAGCTTGACAAATGTTAAAAACACTATTAGCATAAGCAGT |
| | TGTGGCATCTCCTGATGAGGTTCCACCTGGTTTAACATATAGTGAACCGCCACACATGACCATTTCA |
| | CTCAATACTTGAGCACACTCATTAGCTAATCTATAGAAACGGTGTGACAAGCTACAACACGTTGTAT |
| | GTTTGCGAGCAAGAACAAGTGAGGCCATAATTCTAAGCATGTTAGGCATGGCTCTATCACATTTAGG |
| | ATAATCCCAACCCATAAGGTGAGGGTTTTCTACATCACTATAAACAGTTTTTAACATGTTGTGCCAA |
| | CCACCATAGAATTTGCTTGTTCCAATTACTACAGTAGCTCCTCTAGTGGCGGCTATTGATTTCAATA |
| | ATTTTTGATGAAACTGTCTATTGGTCATAGTACTACAGATAGAGACACCAGCTACGGTGCGAGCTCT |
| | ATTCTTTGCACTAATGGCATACTTAAGATTCATTTGAGTTATAGTAGGGATGACATTACGTTTTGTA |
| | TATGCGAAAAGTGCATCTTGATCCTCATAACTCATTGAATCATAATAAAGTCTAGCCTTACCCCATT |
| | TATTAAATGGAAAACCAGCTGATTTGTCTAGGTTGTTGACGATGACTTGGTTAGCATTAATACAGCC |
| | ACCATCGTAACAATCAAAGTACTTATCAACAACTTCAACTACAAATAGTAGTTGTCTGATATCACAC |
| | ATTGTTGGTAGATTATAACGATAGTAGTCATAATCGCTGATAGCAGCATTACCATCCTGAGCAAAGA |
| | AGAAGTGTTTTAATTCAACAGAACTTCCTTCCTTAAAGAAACCCTTAGACACAGCAAAGTCATAGAA |
| | GTCTTTGTTAAAATTACCGGGTTTGACAGTTTGAAAAGCAACATTGTTAGTAAGTGCAGCTACTGAA |
| | AAGCACGTAGTGCGTTTATCTAGTAATAGATTACCAGAAGCAGCGTGCATAGCAGGGTCAGCAGCAT |
| | ACACAAGTAATTCCTTAAAACTAAGTCTAGAGCTATGTAAGTTTACATCCTGATTATGTACAACACC |
| | TAGCTCTCTGAAGTGGTATCCAGTTGAAACTACAAATGGAACACCATCAACAAATATTTTTCTCACT |
| | AGTGGTCCAAAACTTGTAGGTGGGAACACTGTAGAGAATAAAACATTAAAGTTTGCACAATGCAGAA |
| | TGCATCTGTCATCCAAACAGTTAACACAATTTGGGTGGTATGTCTGATCCCAATATTTAAAATAACG |
| | GTCAAAGAGTTTTAACCTCTCTTCCGTGAAGTCATATTTTAACAAATCCCACTTAATGTAAGGCTTT |
| | GTTAAGTCAGTGTCAACATGTGACTCTGCAGTTAAAGCCCTGGTCAAGGTTAATATAGGCATTAACA |
| | ATGAATAATAAGAATCTACAACAGGAACTCCACTACCTGGCGTGGTTTGTATGAAATCACCGAAATC |
| | ATACCAGTTACCATTGAGATCTTGATTATCTAATGTCAGTACACCAACAATACCAGCATTTCGCATG |
| | GCATCACAGAATTGTACTGTTTTTAACAAAGCTTGGCGTACACGTTCACCTAAGTTGGCGTATACGC |
| | GTAATATATCTGGGTTTTCTACAAAATCATACCAGTCCTTTTTATTGAAATAATCATCATCACAACA |
| | ATTGTATGTGACAAGTATTTCTTTTAATGTGTCACAATTACCTTCATCAAAATGCCTTAAAGCATAG |
| | ACGAGGTCTGCCATTGTGTATTTAGTAAGACGTTGACGTGATATATGTGGTACCATGTCACCGTCTA |
| | TTCTAAACTTAAAGAAGTCATGTTTAGCAACAGCTGGACAATCCTTAAGTAAATTATAAATTGTTTC |
| | TTCATGTTGGTAGTTAGAGAAAGTGTGTCTCTTAACTACAAAGTAAGAATCAATTAAATTGTCATCT |
| | TCGTCCTTTTCTTGGAAGCGACAACAATTAGTTTTTAGGAATTTAGCAAAACCAGCTACTTTATCAT |
| | TGTAGATGTCAAAAGCCCTGTATACGACATCAGTACTAGTGCCTGTGCCGCACGGTGTAAGACGGGC |
| | TGCACTTACACCGCAAACCCGTTTAAAAACGATTGTGCATCAGCTGACTGAAGCATGGGTTCGCGGA |
| | GTTGATCACAACTACAGCCATAACCTTTCCACATACCGCAGACGGTACAGACTGTGTTTTTAAGTGT |
| | AAAACCCACAGGGTCATTAGCACAAGTTGTAGGTATTTGTACATACTTACCTTTTAAGTCACAAAAT |
| | CCTTTAGGATTTGGATGATCTATGTGGCAACGGCAGTACAGACAACACGATGCACCACCAAAGGATT |
| | CTTGATCCATATTGGCTTCCGGTGTAACTGTTATTGCCTGACCAGTACCAGTGTGTGTACACAACAT |
| | CTTAACACAATTAGTGATTGGTTGTCCCCCACTAGCTAGATAATCTTTGTAAGCTTTAGCAGCATCT |
| | ACAGCAAAAGCACAGAAAGATAATACAGTTGAATTGGCAGGCACTTCTGTTGCATTACCAGCTTGTA |
| | GACGTACTGTGGCAGCTAAACTACCAAGTACCATACCTCTATTTAGGTTGTTTAATCCTTTAATAAA |
| | GTATAAATACTTCACTTTAGGACCTTTAGGTGTGTCTGTAACAAACCTACAAGGTGGTTCCAGTTCT |
| | GTATAGATAGTACCAGTTCCATCACTCTTAGGGAATCTAGCCCATTTCAAATCCTGTAAATCGGATA |
| | ACAGTGCAAGTACAAACCTACCTCCCTTTGTTGTGTTGTAGTAAGCTAACGCATTGTCATCAGTGCA |
| | AGCAGTTTGTGTAGTACCGGCAGCACAAGACATCTGTCGTAGTGCAACAGGACTAAGCTCATTATTC |
| | TGTAATTTGACAGCAGAATTGGCCCTTAAAGCTGTTACAATAAGAGGCCATGCTAAATTAGGTGAAT |
| | TGTCCATACTAATTTCACTAAGTTGAACAATTTTACTATCTGCATCTACAACCTGTTGGATTTCCCA |
| | CAATGCTGATGCATAAGTAAATGTTGTACCATCACACGTATTTTTATATGTGTTATAGTCTGGTATG |
| | ACAACCATTAGTTTGGCTGCTGTTGTAAGAGGTATTATGTTCAAGGGAACACAACCATCTCTTGCAT |
| | TGTTGATAATGTTGTTGAGTGCATCATTATCCAACTTTCTAAGCATAGTGAAAAGCATTGTCTGCAT |
| | AGCACTAGTAACTTTTGCCCTCTTGTCCTCAGATCTAGCCTGTTTATACATTTGGGTCATAGCTTGA |
| | TCAGCCATCTTTTCCAACTTACGTTGCATGGCTGCATCACGGTCAAATTCAGATTTAGCCACATTCA |
| | AAGACTTCTTCAACTTTTTAAGAACAACTTCAGAATCACCATTAGCAACAGCCTGCTCATAAGCTTC |
| | TTGAGCAGTAGCAAAAGCTGCATATGATGGAAGGGAACTAAACTCTGAGGCTATAGCTTGTAAGGTT |
| | GCCCTGTTGTCCAGCATTTCTTCACAAAGCTTGTTTATGTCTACAGCACCCTGCATGGAAAGCAAAA |
| | CAGAAAGTAGTGAAACCATTTTTTCAAAGGCTTCAGTAGTATCTTTAGCTAAGAGAATGTCATTGTG |
| | TAACTGGACACATTGAGCCCACAATTTAGATGATGATTCTACTCTGAGTTGTTGCAAAACTGAGAGT |
| | AAGACTACTGATGTGCACTTTACATCTGACATTTTAGACTGTACAGTGGCTACTTTGATACAAGGTT |
| | TGCCACCAACACCCAACAATTTAATGTTGAGTTTGAAGGCATCTATGCTATTCTTGGGTGGGAGTAG |
| | TCCCTGTGAATTCATATATCTAAACTCCTGTGTAGAAACTAAGTAATCATAAACACCAAGAGTCAGT |
| | CTAAAGTAGCGGTTGAGTAAACAAAAGAGGCCAAAGTAACAAGTACAAAAATAGCCTAAGAAACAAT |
| | AAACTAGCATTATACACTGAAGTGTATTACCAGTTATGAAGAAAATAGGGCAATACTCAACACACAT |
| | AAAAACAATACCTCTGGCCAAAAACATGACAGTTGTAACTACACCTGAGTAGTTAGAAGTAACAGAG |
| | ATTATAAGAGCCCACATGGAAATGGCTTGATCTAAAGCATTACCATAATAAACTTTATAAACGAGTG |
| | TCAAGACATTCATAAGTGTCCACACTCTCCTAGCACCATCATCATACACAGTTCTTGCTGTCATAAG |
| | GATTAGTAACACTACAGCTGATGCATACATAACACAGTCTTTTAGCTTAAAACCAGACAAACTAGTA |
| | TCAACCATATCCAACCATGTCATAATACGCATCACCCAACTAGCAGGCATATAGACCATATTAAAAT |
| | AAGCTACAGTGGCAAGAGAAGGTAACAAAAACAAACAGAGAAATGCATGCTTATGTTTGACAAACAT |
| | CATTGCAAAAGCAGACATAGCAATAATACCCATAGCAAAAGGTAAAAAGGCATTTTCATACAAAAAA |
| | AAGAACAAAGACCATTGAGTACTCTGGACTAAAACTAAAAGTGAAGTCAAAATTGTGAGTAACAACC |
| | AGTGGTGTGTACCCTTGATTGTTCTTTTCACTGCACTTTGGAAAGTAACACCTGAGCATTGTCTAAC |
| | AACATCAAAAGGTGTAAATTCATCTTCTAATAAAGCACTACCCAATATGGTACGTCCATTCATACCA |
| | TTTTGCAGTAATTCTTTTAATGAAGCACACATATCTAAAACGGCAATTCCAGTTTGAGCAGAAAGAG |
| | GTCCTAGTATGTCAACATGGTCTTGTGTTAGAGGTTCATAATTGTACTTCATAGCCACAAGGTTAAA |
| | GTCATTAAGAGTTGTGGTAAATCGATTGAGAAACCACCTGTCTCCATTTATAACAGCAGCGTACAAC |
| | CAAGCTAAAACATTAACTGTAATAGTTGTGTCCGTACCAGCTGCTTGTGCTGTTTGCCTGTCAACAA |
| | AAGGTCCATAAAAGTTACCTTCTAAGTCTGTGCCAGCATGAACTCCAGTTGGTAATTCCATATGGTG |
| | CATGTAACAAAAAGAGACACAGTCATAATCTATGTTAAAACCAACACTACCACATGAACCATTAAGG |
| | AATGAACCCTTAATAGTGAAATTGGGCCTCATAGCACATTGGTAAACACCAGATGGTGAACCATTGT |
| | AACAAGCTAACACTGAAAAAGTCTGTCCTGGTTGAATGCGAACAAACTTATACTTAGGTGTCTTAGG |
| | ATTGGCTGTATCAACCTTAAGCTTAAGTACACAATTTTGCATAGAATGTCCAATAACCCTGAGTTGA |
| | ACATTACCAGCCTGTACCAAGAAATTATGATTAGACTTACGAATGAGTAAATCTTCATAATTAGGGT |
| | TAAGCATGTCTTCAGAGGTGCAGATCACATGTCTTGGACAGTAAACTACGTCATCAAGCCAAAGACC |
| | GTTAAGTGTAGTTGTACCACAAGTTACTTGTACCATACAACCCTCAACTTTACCAGATGGGAATGCC |
| | ATTTTTCTAAAACCACTCTGCAAAACAGCTGAGGTGATAGAGGTTTGTGGTGGTTGGTAAAGAACAT |
| | CAGAACCTGAGTTACTGAAGTCATTGAGAGCCTTTGCGAGATGACAACAAGCAGCTTCTCTGTAGCT |
| | AGTTGTATCCATTGCTCCACTAAAATACTTGTACTTATTATAAAGAGCTAAGTATCTATTATATTGC |
| | GTAAGAGGTAATAGCACATCACTACGCAACTTTAGATACATTTCTTTATTTAACAAAAAGGTGCACA |
| | GCGCAGCTTCTTCAAAAGTACTAAAGGAAACACCATTAAAGACTACACGTCTCTTTAGGTAATTACT |
| | AAAGAACCAATAGAAATGCTTTGTGGAAATACAAATGATATAAGCAATTGTTATCCAGAAAGGTACT |
| | AAAGGTGTGAACATAACCATCCACTGAATATGTGCTAAAAAAGAAACATCATTAGTAAGATAAAATG |
| | TCAAGTACAAGTAAATAACAGAATAAACACCAGGTAAGAATGAGTAAACTGGTGTTAAACAGAGTAC |
| | AGTGAATGACATAAGGAATAGTAAAGTATTAAAGGCAACTACATGACTGTATTCACCAAAAGCTCTT |
| | CTAAACCTCATAAAATAGTAGGCAAGGCATGTTACTACGATAGCTACAATACCACCAGCTACTATAG |
| | ATGCTGATATGTCCAAAGCACCAATAGGTTGAATTAGTGGTGTAAACATATTAGTAAGTAAATTTAC |
| | AGCATCTACACCACAGAAAACTCCTGGTAAAGATCTGTAATAATCATTGTTAAGTACCCATCTACCA |
| | CTAGTAGATACACAAACACCAGCTTCTGATCTTTCACAAGTGCCGTGCCTACAGTACTCAGAATCAA |
| | AAGTTGTTACCACTCTAACAGAACCTTCAAGGTAGGTGTTAGGAAATTGAATAATAGAGCCATCCAT |
| | GAGCACATAACGTGTGTCAGGGCGTAAACTTTCATAAGCAACAGAACCTTCTAGTACATTGGTATCA |
| | TAACAATATGGTACTGGCTTACCAGAAGCATCTTTAAAAATTGTACATTCAGCAGCCAAAACACAAG |
| | CTGATGTTGCAAAGTCAGTGTACTCTATAAGTTTTGATGGTGTGTAACAGATGTTACCAACTGCACT |
| | AAAAACTCTAGGTAAGAAATGCAAAAAGTCACCATTAGTTGTGCGTAATATCGTGCCAGGCAAACCA |
| | GGCACGACAAAACCCACTTCTCTTGTTATGACTGCAGCAATCAATGGGCAAGCTTTGTCATTAGTAT |
| | AACTACCACCACGCTGGCTAAACCATGTGTCAAAATCAGCATGTTTGTTAGCAAAACAAGTATCTGT |
| | AGATGCTATGTCACGAGTGACACCACCATCAATAGCCTTGTATCCTATGATTTCACTTGAAAAGTCA |
| | GTATGTTTAGACATGACATGAACAGGTGTTATTAAATAGAAAATAGCAGCAACAAAAAGGAACACAA |
| | GTGTAACTTTAATTAACTGCTTCAACCAATTATTAACAATTTTACCACCCTTAAGTGCTATCTTTGT |
| | TGTTACAACATTAACAACTTGTCTAGTAGTTGCACATGTCAACTTAAAAGGTAAGTTATTCTTTTTA |
| | GCAGCACTACGTATTTGTTTTCGTAGTTGTTCAGACAATGACATGAAATCTTTAACGTTCCATATCA |
| | AAGCAATGTTGTGACTTTTTGCTACCTGCGCATTAATATGACGCGCACTACAGTCAATACAAGCACC |
| | AAGGTCACGGGGTGTCATGTTTTCAACTTTGTTATAGGTGAGCATATAGTTATTACAACTATCGCCA |
| | GTAACTTCTATGTCAGATTGATGTGACAATTTAAGACATTCAACAACATCTTTAGTTTCTACATCTG |
| | AATCAACAAACCCTTGCCGAGCTGCTGAAATAAAAGTAGATAAGACATTGTCTAAGGACACATTCTT |
| | TGCAAGTTCAGCTTCTGCAGTTGCAACTAGTGTTTTGAGTTTTTCCATTGGTACGTTAAAAGTTGAT |
| | GAAAACGTATTAACGTAAGCATCAAACATTTTAACTGCAACTTCCGCACTATCACCAACATCAGACA |
| | CTAATGCCTGATCTAGTAACAGTATAGGTTGACACATAAGCTGACTGTAGTAAACAGACGCTGATTT |
| | TGCAGATGATTCTTCACATTTTGATTTACCATCAAAAACTATAACATTAATAGGCAATGAACCTTTA |
| | GTGTTATTAGCTCTCAGGTTGTCTAAGTTAACAAAATGAGAGAGAGAATGTCTTTCATAAGTCTTTT |
| | GACCAGCTTTATCAAAGTAAAGATGGATGGAACCATTCTTCACTGTAACACTATCAACGATGTAAGA |
| | AGACTGGTCAGTAGGATTTATTGGTCTTTTAAACTGTAGTGACAAGTCTCTCGCAACTTCATCACTA |
| | ATAAATGTACTACCAGCACAGAATGTATCACAATTAACACAATTCCAATTGTGTAGTTTGCAAAAGC |
| | CTTTACCTCCATTAGCATAGACATAAAAGGACCTTCTAACACCATTAACAATAGTTGTACATTCGAC |
| | TCTTGTTGCTCTATTACGTTTGTAACACATCATACAAGTTGATGAATTACAACCGTCTACAACATGC |
| | ACATAACTTTTCCATACATAATAAAATGATGCAAAGAAGATGTACATTCTAACCATAGCTGAAATCG |
| | GGGCCATTTGTACAAGATTAATTATTAACCACATAAGCCAAGAATTACTAATAAAATGTACTGCAAA |
| | ATAGCTGAAAAACAATTGCATGATTGCAGCCAATCCAAGTACATAGAAAAACCTAGTGAAAAGAATA |
| | TATGCCAAAAACCACTCTGCAACTAAGCCAAAAGCAGTTAAATCCCATTTAAAAGATGAAATGGTAA |
| | TTTGTATAGTTTCTAAAGAAGGATAGGTGTCTAAAGAATCTAAACCACTAAGACAAACACTACAAGG |
| | TATAGAACCAGTACAGTAGGTTGCAATAGTGACATTAGTAGAGTTCAAATAGCCTTCTCTGTAACCA |
| | GTACAGTAAGAAGGCATGCCTAAATTAGACATTAAAACACCTAAAGCAGCGGTTGAGTAGATTAAAG |
| | AACCTAGGCAAACACTTAATAGTAAAAACCAAATTATAATATTTATCAGTTTAGAAAAATTAGGTGA |
| | CTTCAAATAATTAAATGAAGCCTCTAGACAAAATTTACCGACACTCTTAACAGTATTCTTTGCTATA |
| | GTAGTCGGCATAGATGCTTTAATTCTAGAATTTGTACTTCTAGTAAAAGTACACAATTGTAGCAATA |
| | AAGTAAAGAAATAAGGCATATAATTAGTACAAACACGGTTTAAACACCGTGTAACTATGTTAGTAGT |
| | TGTACTAACAACTTTGTTAAGAAAAGGCTTAGCATAATTAGCTATAGTATCCCAAGGGACACTATTA |
| | ACAGCAGCTAAACCATGAGTAGCAAGGGTTTTCAAACCTAATACTCTAGATAATTCATTAGGTTTCT |
| | TAATAGTAAGACTAGAATTGTCTACATAAGCAGCCATTAGATCTGTGTGGCCAACCTCTTCTGTAAT |
| | TTTTAAACTATTATTTGCTGGTTTAAGTATAATGTCTCCTACAACTTCGGTAGTTTTCACATTACAC |
| | TCAAGAACGTCTTTCTGTATGGTAGGATTTTCCACTACTTCTTCAGAGACTGGTTTTAGATCTTCGC |
| | AGGCAAGATTATCCATTCCCTGCGCGTCCTCTGACTTCAGTACATCAAACGAATTTGATGTTTCAAC |
| | TGGTTTTGTGCTCCAAAGACAACGTATACACCAGGTATTTGGTTTATACGTGGCTTTATTAGTTGCA |
| | TTGTTAACATGCCAAACAATAGGTTTATGTAACAATTTAGCTCCTTTCTTAAAAGAGGGTGTGTAGT |
| | GTTTATAATCAATAGCCACCACATCACCATTTAAGTCAGGGAAAAATGTAACTTTAAGCTCTCTTGA |
| | AGCAGGTTTCTTATAACCAGTTAACTGGTTTAAATCATCAGCAAATTTGATATTATCACATACAAAC |
| | TTAAAATTATCGAAGCTTGCGTTTGGATATGGTTGGTTTGGTACAAGATCAATTGGTTGCTCTGTGA |
| | AATAAGAATTGTCTTTCTTATAATAATTGTCCAACTTAGGGTCAATTTCTGTACAAACAACACCATC |
| | CAATTTATAAGTAACTGGTTTTATGGTTGTTGTGTAACTGTTTTCTTTGTAGAAAACATCCGTAATA |
| | GGACCTTTGTATTCTGAGGACTTTGTAAGTAAAGCACCGTCTATGCAATACAAAGTTTCTTTAGAAG |
| | TTATATGTTTATAGTGACCACACTGGTAATTACCAGTGTACTCACTAGCACAAGTAAATGTACCATG |
| | CTTAAGTTCATACTGAGCAGGTGGTGCTGACATCATAACAAAAGGTGACTCCTGTTGTACTAGATAT |
| | TTTGTAGCTTGTTTACCACACGTACAAGGTATCTGAACACCTTTCTTAAATTGTTCATAAGAAAGTG |
| | TGCCCATGTACATAACAGCTTCTACACCCTTAAGGGTTGTCTGCTGTTGTCCACAAGTTTTACACAC |
| | CACGTTCAAGACTCTTTTGCAAGAATCTAAATTGGCATGTTGAAACAAGTAACTCATTGTTTCTCTA |
| | ACATCACCTAACTCACCTACTGTCTTATTACAGTAGGCTAAGATAAGTGCACAAAAGTTAGCAGCTT |
| | CACCAGCCCTTGCTCTGTAATAAGCATCTTGTAGAGCAGGTGGATTAAACTTCAACTCTATTTGTTG |
| | GAGTGTTAACAATGCAGTGGCAAGATAACAGTTGTTATCTGCCCATTTAATAGAAGTTAAACCATTA |
| | ACTTGTGGGTATTTCCACTTTTTAGTGTGATTTAATGCTGACATGTACCTACCCAGAAAACTAGGAT |
| | CAGTTGTGTGGTAGTACTCAAAAGCCTCAACACGTAGAGTGTCATCATTAGGTAAAACATAAAATGT |
| | TTTACCTTCATGTGAATTATGAGGTTTTATTTTAGTAACATCAGCTCCATCCAAATAAGTTGGACCA |
| | AACTGTTGTCCATATGTCATTGACATGTCCACAACTTGCGTGTGGAGGTTAATGTTGTCTACTGTTG |
| | TAAACACCTTAATAGTCCTCACTTCTCTCAAAGAAAGAAGTGTCTTAAGATTGTCAAAGGTGATAAC |
| | TTCACCATCTAGGTGGAATGTGGTAGGATTACTAGTGTAATATACACTTTTATCACCTCTCTTAAGA |
| | AATTCTATACCTAGTTGTGTAGATTGTCCAGAATAGGACCAATCTTTATAGGAACCAGCAAGTGAGA |
| | TGGTTTCAATAAAATGTTCTTCAGGTGTTTTAGAAGAAGAAGTAAGATAACCATTATACGCTGTAAC |
| | AGCATCAGGTGAAGAAACAGAAACTGTAGCTGGCACTTTGAGAGATCTCATATACCGAGCAGCTTCT |
| | TCCAAATTTAAGCCATGTGTTACATAGCCAAGTGGCATTGTAACAAGAGTTTCATTTAGATCGTTAA |
| | GTGTGTTGATAAGTGACGCTACAGTTGTTTTACTGGTGTAAAAGTAAAATCTAGCACCATAATCAAC |
| | CACACCCTCTTGTATTTTAATACCCTTATATTTACGCTGTATAGTTGAAACTATGGCTTTAGTTTCC |
| | ACACAGACAGGCATTAATTTGCGTGTTTCTTCTGCATGTGCAAGCATTTCTCGCAAATTCCAAGAAA |
| | CAGTTCCAAGAATTTCTTGCTTCTCATTAGAGATAATAGATGGTAGAATGTAAAAGGCACTTTTACA |
| | CTTTTTAAGCACTGTCTTTGCCTCCTCTACAGTGTAACCATTTAAACCCTGACCCGGGTAAGTGGTT |
| | ATATAATTGTCTGTTGGCACTTTTCTCAAAGCTTTCGCTAGCATTTCAGTAGTGCCACCAGCCTTTT |
| | TAGTAGGTATAACCACAGCAGTTAAAACACCCTCTTGAACAACATCACCCACTATATATGGAGCATC |
| | TTTCTTTAAGAAAGTGATGTCAATGTCACTAACAAGAGTGGCAGAATCTGGATGAAGATTGCCATTA |
| | ATGTCAATATAAAGTAACAAGTTTTCTGTGAGGAACTTAGTTTCTTCCAGAGTTGTTGTAACTTCTT |
| | CAACACAAGCTTTGATTTTCTTATCATCTTGTTTTCTCTGTTCAACTGAAGGTTTACTTTCAGTTAT |
| | AAATGGCTTAACTTCCTCTTTAGGAATCTCAGCGATCTTTTGTTCAACTTGCTTTTCACTCTTCATT |
| | TCCAAAAAGCTTGAAACAAGTTTGTCATAGAGATTTTTATCAAAGACAGCTAAGTAGACATTTGTGC |
| | GAACAGTATCTACACAAACTCTTAAAGAATGTATAGGGTCAGCACCAAAAATACCAGCTGATAATAA |
| | TGGTGCAAGTAGAACTTCGTGCTGATTAAAATTTTCATAAGCACTCTTAAGAAGTTGAATGTCTTCA |
| | CCTTTGTTAACATTTGGGCCGACAACATGAAGACAGTGTTTAGCAAGATTGTGTCCGCTTAAAACAC |
| | AACTACCACCCACTTTAAGTGGTCCATTAGTAGCTATGTAATCATCAGATTCAACTTGCATGGCATT |
| | GTTAGTAGCCTTATTTAAGGCTCCTGCAACACCTCCTCCATGTTTAAGGTAAACATTGGCTGCATTA |
| | ACAACCACTGTTGGTTTTACCTTTTTAGCTTCTTCCACAATGTCTGCATTTTTAATGTATACATTGT |
| | CAGTAAGTTTTAAATAACCACTAAAACTATTCACTTCAATAGTCTGAACAACTGGTGTAAGTTCCAT |
| | CTCTAATTGAGGTTGAACCTCAACAATTGTTTGAATAGTAGTTGTCTGATTGTCCTCACTGCCGTCT |
| | TGTTGACCAACAGTTTGTTGACTATCATCATCTAACCAATCTTCTTCTTGCTCTTCTTCAGGTTGAA |
| | GAGCAGCAGAAGTGGCACCAAATTCCAAAGGTTTACCTTGGTAATCATCTTCAGTACCATACTCATA |
| | TTGAGTTGATGGCTCAAACTCTTCTTCTTCACAATCACCTTCTTCTTCATCCTCATCTGGAGGGTAG |
| | AAAGAACAATACATATGTGAAGCCAATTTAAACTCACCAGACTCATCAAATAAGTAGTATGTAGCCA |
| | TACTCCACTCATCTAAATCAATGCCCAGTGGTGTAAGTAATTCAGATACTGGTTGCAAAGTTTTTAT |
| | GACAGCATCTGCCACAACACAGGCGAACTCATTTACTTCTGTACCGAGTTCAACTGTATAGGCAGAG |
| | CACTTCTCATTAAGTACTTTATCAATCCTTTCATCAAGTTCAAAAGTGATATTCACACTCTTGTAAC |
| | CTTGCACTTCTATCACAGTGTCATCACCAAAAGTAACCTTTGTTGGTGCACCGCCTTTGAGTGTGAA |
| | GGTATTGTTTGTTACCATCATATTAGGTGCAAGGGCACAGTACTTTTCTGTGTCTTTGATTTCGAGC |
| | AACATAAGCCCGTTAATACAAACTGGTGTACCAACCAATGGAGCTTCAACAGCTTCACTAGTAGGTT |
| | GTTCTAATGGTTGTAAATCACCAGTTTTCAAGACAACTTCCTCTGTTAACACTTCTGTGGGAAGTGT |
| | TTCTCCCTCTAAGAAGATAATTTCTTTTGGGGCTTTTAGAGGCATGAGTAGGCCAGTTTCTTCTCTG |
| | GATTTAACACACTTTCTGTACAATCCCTTTGAGTGCGTGACAAATGTTTCACCTAAATTCAAGGCTT |
| | TAAGTTTAGCTCCACCAATAATGATAGAGTCAGCACACAAAGCCAAAAATTTATTTACAAGCTTAAA |
| | GAATGTCTGAACACTCTCCTTAATTTCCTTTGCACAGGTGACAATTTGTCCACCGACAATTTCACAA |
| | GCACAGGTTGAGATAAATTTAACAATTTCCCAACCGTCTCTAAGAAACTCTACACCTTCCTTAAACT |
| | TCTCTTCAAGCCAATCAAGGACGGGTTTGAGTTTTTCATAAACAGTGCCAAAGATGTTAGTTAGCCA |
| | CTGCGAAGTCAACTGAACAACACCACCTGTAATGTAGGCCATTACAACTAGATTGTTAGTAGCCAAA |
| | TCAGATGTGAACATCATAGCATCAATGAGTCTCAGTGAATACTGTGAAATTCCATCTAGTATTGTTA |
| | TAGCGGCCTTCTGTAAAACACGCACAGAATTTTGAGCAGTTTCAAGAGTGCGGGAGAAAATTGATCG |
| | TACAACACGAGCAGCCTCTGATGCAAATGCATAAAGAGGACTCAGTATTGATTTCTGTTCACCAATA |
| | TTCCAGGCACCTTTTTTAGCTTTTCCTTTTGTAACTTTAAAATTACCACAGGATTCAACAATTTGTT |
| | TGAATGCTTTATAATCCAAACCTTTCACAGTTTCCACAAAAGCACTTGTGGAAGCAGAAAAAGATGC |
| | CAAAATAATGGCGATCTCTTCATTAAGTTTAAAGTCACCAACAATATTGATGTTGACTTTCTCTTTT |
| | TGGAGTATTTCAAGAAGGTTGTCATTAAGACCTTCGGAACCTTCTCCAACAACACCTGTATGGTTAC |
| | AACCTATGTTAGCGCTAGCACGTGGAACCCAATAGGCACACTTGTTATGGCAACCAACATAAGAGAA |
| | CACACAGCCTCCAAAGGCAATAGTGCGACCACCCTTACGAAGAATGGTTTTCAAGCCAGATTCATTA |
| | TGGTATTCGGCAAGACTATGCTCAGGTCCTACTTCTGAATTGTGACATGCTGGACAATAAATTTTAA |
| | CAACAGCATTTTGGGGTAAGTAACCACAAGTAGTGGCACCTTCTTTAGTCAAATTCTCAGTGCCACA |
| | AAATTCGCAAGTGGCTTTAACAAAATCGCCCGTCTGCCATGAAGTTTCACCACAATGATCACACTTC |
| | ATGAGAGTTGAAAGGCACATTTGGTTGCATTCATTTGGTGACGCAACTGGATAGACAGATCGAATTC |
| | TACCCATAAAGCCATCAAGCTTTTTCTTTTCAACCCTTGGTTGAATAGTCTTGATTATGGAATTTAA |
| | GGGAAATACAAAATTTGGACATTCCCCATTGAAGGTGTCAAATTTCTTTGCCAATTTAATTTCAAAA |
| | GGTGTCTGCAATTCATAGCTCTTTTCAGAACGTTCCGTGTACCAAGCAATTTCATGCTCATGTTCAC |
| | GGCAGCAGTATACACCCCTCTTAGTGTCAATAAAGTCCAGTTGTTCGGACAAAGTGCATGAAGCTTT |
| | ACCAGCACGTGCTAGAAGGTCTTTAATGCACTCAAGAGGGTAGCCATCAGGGCCACAGAAGTTGTTA |
| | TCGACATAGCGAGTGTATGCCCCTCCGTTAAGCTCACGCATGAGTTCACGGGTAACACCACTGCTAT |
| | GTTTAGTGTTCCAGTTTTCTTGAAAATCTTCATAAGGATCAGTGCCAAGCTCGTCGCCTAAGTCAAA |
| | TGACTTTAGATCGGCGCCGTAACTATGGCCACCAGCTCCTTTATTACCGTTCTTACGAAGAAGAACC |
| | TTGCGGTAAGCCACTGGTATTTCGCCCACATGAGGGACAAGGACACCAAGTGTCTCACCACTACGAC |
| | CGTACTGAATGCCTTCGAGTTCTGCTACCAGCTCAACCATAACATGACCATGAGGTGCAGTTCGAGC |
| | ATCCGAACGTTTGATGAACACATAGGGCTGTTCAAGTTGAGGCAAAACGCCTTTTTCAACTTCTACT |
| | AAGCCACAAGTGCCATCTTTAAGATGTTGACGTGCCTCTGATAAGACCTCCTCCACGGAGTCTCCAA |
| | AGCCACGTACGAGCACGTCGCGAACCTGTAAAACAGGCAAACTGAGTTGGACGTGTGTTTTCTCGTT |
| | GAAACCAGGGACAAGGCTCTCCATCTTACCTTTCGGTCACACCCGGACGAAACCTAGATGTGCTGAT |
| | GATCGGCTGCAACACGGACGAAACCGTAAGCAGCCTGCAGAAGATAGACGAGTTACTCGTGTCCTGT |
| | CAACGACAGTAATTAGTTATTAATTATACTGCGTGAGTGCACTAAGCATGCAGCCGAGTGACAGCCA |
| | CACAGATTTTAAAGTTCGTTTAGAGAACAGATCTACAAGAGATCGAAAGTTGGTTGGTTTGTTACCT |
| | GGGAAGGTATAAACCTTTAAT |
| 2 | GenBank Accession No. AY278741.1 (SARS coronavirus Urbani, complete genome) |
| | ATATTAGGTTTTTACCTACCCAGGAAAAGCCAACCAACCTCGATCTCTTGTAGATCTGTTCTCTAAA |
| | CGAACTTTAAAATCTGTGTAGCTGTCGCTCGGCTGCATGCCTAGTGCACCTACGCAGTATAAACAAT |
| | AATAAATTTTACTGTCGTTGACAAGAAACGAGTAACTCGTCCCTCTTCTGCAGACTGCTTACGGTTT |
| | CGTCCGTGTTGCAGTCGATCATCAGCATACCTAGGTTTCGTCCGGGTGTGACCGAAAGGTAAGATGG |
| | AGAGCCTTGTTCTTGGTGTCAACGAGAAAACACACGTCCAACTCAGTTTGCCTGTCCTTCAGGTTAG |
| | AGACGTGCTAGTGCGTGGCTTCGGGGACTCTGTGGAAGAGGCCCTATCGGAGGCACGTGAACACCTC |
| | AAAAATGGCACTTGTGGTCTAGTAGAGCTGGAAAAAGGCGTACTGCCCCAGCTTGAACAGCCCTATG |
| | TGTTCATTAAACGTTCTGATGCCTTAAGCACCAATCACGGCCACAAGGTCGTTGAGCTGGTTGCAGA |
| | AATGGACGGCATTCAGTACGGTCGTAGCGGTATAACACTGGGAGTACTCGTGCCACATGTGGGCGAA |
| | ACCCCAATTGCATACCGCAATGTTCTTCTTCGTAAGAACGGTAATAAGGGAGCCGGTGGTCATAGCT |
| | ATGGCATCGATCTAAAGTCTTATGACTTAGGTGACGAGCTTGGCACTGATCCCATTGAAGATTATGA |
| | ACAAAACTGGAACACTAAGCATGGCAGTGGTGCACTCCGTGAACTCACTCGTGAGCTCAATGGAGGT |
| | GCAGTCACTCGCTATGTCGACAACAATTTCTGTGGCCCAGATGGGTACCCTCTTGATTGCATCAAAG |
| | ATTTTCTCGCACGCGCGGGCAAGTCAATGTGCACTCTTTCCGAACAACTTGATTACATCGAGTCGAA |
| | GAGAGGTGTCTACTGCTGCCGTGACCATGAGCATGAAATTGCCTGGTTCACTGAGCGCTCTGATAAG |
| | AGCTACGAGCACCAGACACCCTTCGAAATTAAGAGTGCCAAGAAATTTGACACTTTCAAAGGGGAAT |
| | GCCCAAAGTTTGTGTTTCCTCTTAACTCAAAAGTCAAAGTCATTCAACCACGTGTTGAAAAGAAAAA |
| | GACTGAGGGTTTCATGGGGCGTATACGCTCTGTGTACCCTGTTGCATCTCCACAGGAGTGTAACAAT |
| | ATGCACTTGTCTACCTTGATGAAATGTAATCATTGCGATGAAGTTTCATGGCAGACGTGCGACTTTC |
| | TGAAAGCCACTTGTGAACATTGTGGCACTGAAAATTTAGTTATTGAAGGACCTACTACATGTGGGTA |
| | CCTACCTACTAATGCTGTAGTGAAAATGCCATGTCCTGCCTGTCAAGACCCAGAGATTGGACCTGAG |
| | CATAGTGTTGCAGATTATCACAACCACTCAAACATTGAAACTCGACTCCGCAAGGGAGGTAGGACTA |
| | GATGTTTTGGAGGCTGTGTGTTTGCCTATGTTGGCTGCTATAATAAGCGTGCCTACTGGGTTCCTCG |
| | TGCTAGTGCTGATATTGGCTCAGGCCATACTGGCATTACTGGTGACAATGTGGAGACCTTGAATGAG |
| | GATCTCCTTGAGATACTGAGTCGTGAACGTGTTAACATTAACATTGTTGGCGATTTTCATTTGAATG |
| | AAGAGGTTGCCATCATTTTGGCATCTTTCTCTGCTTCTACAAGTGCCTTTATTGACACTATAAAGAG |
| | TCTTGATTACAAGTCTTTCAAAACCATTGTTGAGTCCTGCGGTAACTATAAAGTTACCAAGGGAAAG |
| | CCCGTAAAAGGTGCTTGGAACATTGGACAACAGAGATCAGTTTTAACACCACTGTGTGGTTTTCCCT |
| | CACAGGCTGCTGGTGTTATCAGATCAATTTTTGCGCGCACACTTGATGCAGCAAACCACTCAATTCC |
| | TGATTTGCAAAGAGCAGCTGTCACCATACTTGATGGTATTTCTGAACAGTCATTACGTCTTGTCGAC |
| | GCCATGGTTTATACTTCAGACCTGCTCACCAACAGTGTCATTATTATGGCATATGTAACTGGTGGTC |
| | TTGTACAACAGACTTCTCAGTGGTTGTCTAATCTTTTGGGCACTACTGTTGAAAAACTCAGGCCTAT |
| | CTTTGAATGGATTGAGGCGAAACTTAGTGCAGGAGTTGAATTTCTCAAGGATGCTTGGGAGATTCTC |
| | AAATTTCTCATTACAGGTGTTTTTGACATCGTCAAGGGTCAAATACAGGTTGCTTCAGATAACATCA |
| | AGGATTGTGTAAAATGCTTCATTGATGTTGTTAACAAGGCACTCGAAATGTGCATTGATCAAGTCAC |
| | TATCGCTGGCGCAAAGTTGCGATCACTCAACTTAGGTGAAGTCTTCATCGCTCAAAGCAAGGGACTT |
| | TACCGTCAGTGTATACGTGGCAAGGAGCAGCTGCAACTACTCATGCCTCTTAAGGCACCAAAAGAAG |
| | TAACCTTTCTTGAAGGTGATTCACATGACACAGTACTTACCTCTGAGGAGGTTGTTCTCAAGAACGG |
| | TGAACTCGAAGCACTCGAGACGCCCGTTGATAGCTTCACAAATGGAGCTATCGTTGGCACACCAGTC |
| | TGTGTAAATGGCCTCATGCTCTTAGAGATTAAGGACAAAGAACAATACTGCGCATTGTCTCCTGGTT |
| | TACTGGCTACAAACAATGTCTTTCGCTTAAAAGGGGGTGCACCAATTAAAGGTGTAACCTTTGGAGA |
| | AGATACTGTTTGGGAAGTTCAAGGTTACAAGAATGTGAGAATCACATTTGAGCTTGATGAACGTGTT |
| | GACAAAGTGCTTAATGAAAAGTGCTCTGTCTACACTGTTGAATCCGGTACCGAAGTTACTGAGTTTG |
| | CATGTGTTGTAGCAGAGGCTGTTGTGAAGACTTTACAACCAGTTTCTGATCTCCTTACCAACATGGG |
| | TATTGATCTTGATGAGTGGAGTGTAGCTACATTCTACTTATTTGATGATGCTGGTGAAGAAAACTTT |
| | TCATCACGTATGTATTGTTCCTTTTACCCTCCAGATGAGGAAGAAGAGGACGATGCAGAGTGTGAGG |
| | AAGAAGAAATTGATGAAACCTGTGAACATGAGTACGGTACAGAGGATGATTATCAAGGTCTCCCTCT |
| | GGAATTTGGTGCCTCAGCTGAAACAGTTCGAGTTGAGGAAGAAGAAGAGGAAGACTGGCTGGATGAT |
| | ACTACTGAGCAATCAGAGATTGAGCCAGAACCAGAACCTACACCTGAAGAACCAGTTAATCAGTTTA |
| | CTGGTTATTTAAAACTTACTGACAATGTTGCCATTAAATGTGTTGACATCGTTAAGGAGGCACAAAG |
| | TGCTAATCCTATGGTGATTGTAAATGCTGCTAACATACACCTGAAACATGGTGGTGGTGTAGCAGGT |
| | GCACTCAACAAGGCAACCAATGGTGCCATGCAAAAGGAGAGTGATGATTACATTAAGCTAAATGGCC |
| | CTCTTACAGTAGGAGGGTCTTGTTTGCTTTCTGGACATAATCTTGCTAAGAAGTGTCTGCATGTTGT |
| | TGGACCTAACCTAAATGCAGGTGAGGACATCCAGCTTCTTAAGGCAGCATATGAAAATTTCAATTCA |
| | CAGGACATCTTACTTGCACCATTGTTGTCAGCAGGCATATTTGGTGCTAAACCACTTCAGTCTTTAC |
| | AAGTGTGCGTGCAGACGGTTCGTACACAGGTTTATATTGCAGTCAATGACAAAGCTCTTTATGAGCA |
| | GGTTGTCATGGATTATCTTGATAACCTGAAGCCTAGAGTGGAAGCACCTAAACAAGAGGAGCCACCA |
| | AACACAGAAGATTCCAAAACTGAGGAGAAATCTGTCGTACAGAAGCCTGTCGATGTGAAGCCAAAAA |
| | TTAAGGCCTGCATTGATGAGGTTACCACAACACTGGAAGAAACTAAGTTTCTTACCAATAAGTTACT |
| | CTTGTTTGCTGATATCAATGGTAAGCTTTACCATGATTCTCAGAACATGCTTAGAGGTGAAGATATG |
| | TCTTTCCTTGAGAAGGATGCACCTTACATGGTAGGTGATGTTATCACTAGTGGTGATATCACTTGTG |
| | TTGTAATACCCTCCAAAAAGGCTGGTGGCACTACTGAGATGCTCTCAAGAGCTTTGAAGAAAGTGCC |
| | AGTTGATGAGTATATAACCACGTACCCTGGACAAGGATGTGCTGGTTATACACTTGAGGAAGCTAAG |
| | ACTGCTCTTAAGAAATGCAAATCTGCATTTTATGTACTACCTTCAGAAGCACCTAATGCTAAGGAAG |
| | AGATTCTAGGAACTGTATCCTGGAATTTGAGAGAAATGCTTGCTCATGCTGAAGAGACAAGAAAATT |
| | AATGCCTATATGCATGGATGTTAGAGCCATAATGGCAACCATCCAACGTAAGTATAAAGGAATTAAA |
| | ATTCAAGAGGGCATCGTTGACTATGGTGTCCGATTCTTCTTTTATACTAGTAAAGAGCCTGTAGCTT |
| | CTATTATTACGAAGCTGAACTCTCTAAATGAGCCGCTTGTCACAATGCCAATTGGTTATGTGACACA |
| | TGGTTTTAATCTTGAAGAGGCTGCGCGCTGTATGCGTTCTCTTAAAGCTCCTGCCGTAGTGTCAGTA |
| | TCATCACCAGATGCTGTTACTACATATAATGGATACCTCACTTCGTCATCAAAGACATCTGAGGAGC |
| | ACTTTGTAGAAACAGTTTCTTTGGCTGGCTCTTACAGAGATTGGTCCTATTCAGGACAGCGTACAGA |
| | GTTAGGTGTTGAATTTCTTAAGCGTGGTGACAAAATTGTGTACCACACTCTGGAGAGCCCCGTCGAG |
| | TTTCATCTTGACGGTGAGGTTCTTTCACTTGACAAACTAAAGAGTCTCTTATCCCTGCGGGAGGTTA |
| | AGACTATAAAAGTGTTCACAACTGTGGACAACACTAATCTCCACACACAGCTTGTGGATATGTCTAT |
| | GACATATGGACAGCAGTTTGGTCCAACATACTTGGATGGTGCTGATGTTACAAAAATTAAACCTCAT |
| | GTAAATCATGAGGGTAAGACTTTCTTTGTACTACCTAGTGATGACACACTACGTAGTGAAGCTTTCG |
| | AGTACTACCATACTCTTGATGAGAGTTTTCTTGGTAGGTACATGTCTGCTTTAAACCACACAAAGAA |
| | ATGGAAATTTCCTCAAGTTGGTGGTTTAACTTCAATTAAATGGGCTGATAACAATTGTTATTTGTCT |
| | AGTGTTTTATTAGCACTTCAACAGCTTGAAGTCAAATTCAATGCACCAGCACTTCAAGAGGCTTATT |
| | ATAGAGCCCGTGCTGGTGATGCTGCTAACTTTTGTGCACTCATACTCGCTTACAGTAATAAAACTGT |
| | TGGCGAGCTTGGTGATGTCAGAGAAACTATGACCCATCTTCTACAGCATGCTAATTTGGAATCTGCA |
| | AAGCGAGTTCTTAATGTGGTGTGTAAACATTGTGGTCAGAAAACTACTACCTTAACGGGTGTAGAAG |
| | CTGTGATGTATATGGGTACTCTATCTTATGATAATCTTAAGACAGGTGTTTCCATTCCATGTGTGTG |
| | TGGTCGTGATGCTACACAATATCTAGTACAACAAGAGTCTTCTTTTGTTATGATGTCTGCACCACCT |
| | GCTGAGTATAAATTACAGCAAGGTACATTCTTATGTGCGAATGAGTACACTGGTAACTATCAGTGTG |
| | GTCATTACACTCATATAACTGCTAAGGAGACCCTCTATCGTATTGACGGAGCTCACCTTACAAAGAT |
| | GTCAGAGTACAAAGGACCAGTGACTGATGTTTTCTACAAGGAAACATCTTACACTACAACCATCAAG |
| | CCTGTGTCGTATAAACTCGATGGAGTTACTTACACAGAGATTGAACCAAAATTGGATGGGTATTATA |
| | AAAAGGATAATGCTTACTATACAGAGCAGCCTATAGACCTTGTACCAACTCAACCATTACCAAATGC |
| | GAGTTTTGATAATTTCAAACTCACATGTTCTAACACAAAATTTGCTGATGATTTAAATCAAATGACA |
| | GGCTTCACAAAGCCAGCTTCACGAGAGCTATCTGTCACATTCTTCCCAGACTTGAATGGCGATGTAG |
| | TGGCTATTGACTATAGACACTATTCAGCGAGTTTCAAGAAAGGTGCTAAATTACTGCATAAGCCAAT |
| | TGTTTGGCACATTAACCAGGCTACAACCAAGACAACGTTCAAACCAAACACTTGGTGTTTACGTTGT |
| | CTTTGGAGTACAAAGCCAGTAGATACTTCAAATTCATTTGAAGTTCTGGCAGTAGAAGACACACAAG |
| | GAATGGACAATCTTGCTTGTGAAAGTCAACAACCCACCTCTGAAGAAGTAGTGGAAAATCCTACCAT |
| | ACAGAAGGAAGTCATAGAGTGTGACGTGAAAACTACCGAAGTTGTAGGCAATGTCATACTTAAACCA |
| | TCAGATGAAGGTGTTAAAGTAACACAAGAGTTAGGTCATGAGGATCTTATGGCTGCTTATGTGGAAA |
| | ACACAAGCATTACCATTAAGAAACCTAATGAGCTTTCACTAGCCTTAGGTTTAAAAACAATTGCCAC |
| | TCATGGTATTGCTGCAATTAATAGTGTTCCTTGGAGTAAAATTTTGGCTTATGTCAAACCATTCTTA |
| | GGACAAGCAGCAATTACAACATCAAATTGCGCTAAGAGATTAGCACAACGTGTGTTTAACAATTATA |
| | TGCCTTATGTGTTTACATTATTGTTCCAATTGTGTACTTTTACTAAAAGTACCAATTCTAGAATTAG |
| | AGCTTCACTACCTACAACTATTGCTAAAAATAGTGTTAAGAGTGTTGCTAAATTATGTTTGGATGCC |
| | GGCATTAATTATGTGAAGTCACCCAAATTTTCTAAATTGTTCACAATCGCTATGTGGCTATTGTTGT |
| | TAAGTATTTGCTTAGGTTCTCTAATCTGTGTAACTGCTGCTTTTGGTGTACTCTTATCTAATTTTGG |
| | TGCTCCTTCTTATTGTAATGGCGTTAGAGAATTGTATCTTAATTCGTCTAACGTTACTACTATGGAT |
| | TTCTGTGAAGGTTCTTTTCCTTGCAGCATTTGTTTAAGTGGATTAGACTCCCTTGATTCTTATCCAG |
| | CTCTTGAAACCATTCAGGTGACGATTTCATCGTACAAGCTAGACTTGACAATTTTAGGTCTGGCCGC |
| | TGAGTGGGTTTTGGCATATATGTTGTTCACAAAATTCTTTTATTTATTAGGTCTTTCAGCTATAATG |
| | CAGGTGTTCTTTGGCTATTTTGCTAGTCATTTCATCAGCAATTCTTGGCTCATGTGGTTTATCATTA |
| | GTATTGTACAAATGGCACCCGTTTCTGCAATGGTTAGGATGTACATCTTCTTTGCTTCTTTCTACTA |
| | CATATGGAAGAGCTATGTTCATATCATGGATGGTTGCACCTCTTCGACTTGCATGATGTGCTATAAG |
| | CGCAATCGTGCCACACGCGTTGAGTGTACAACTATTGTTAATGGCATGAAGAGATCTTTCTATGTCT |
| | ATGCAAATGGAGGCCGTGGCTTCTGCAAGACTCACAATTGGAATTGTCTCAATTGTGACACATTTTG |
| | CACTGGTAGTACATTCATTAGTGATGAAGTTGCTCGTGATTTGTCACTCCAGTTTAAAAGACCAATC |
| | AACCCTACTGACCAGTCATCGTATATTGTTGATAGTGTTGCTGTGAAAAATGGCGCGCTTCACCTCT |
| | ACTTTGACAAGGCTGGTCAAAAGACCTATGAGAGACATCCGCTCTCCCATTTTGTCAATTTAGACAA |
| | TTTGAGAGCTAACAACACTAAAGGTTCACTGCCTATTAATGTCATAGTTTTTGATGGCAAGTCCAAA |
| | TGCGACGAGTCTGCTTCTAAGTCTGCTTCTGTGTACTACAGTCAGCTGATGTGCCAACCTATTCTGT |
| | TGCTTGACCAAGTTCTTGTATCAGACGTTGGAGATAGTACTGAAGTTTCCGTTAAGATGTTTGATGC |
| | TTATGTCGACACCTTTTCAGCAACTTTTAGTGTTCCTATGGAAAAACTTAAGGCACTTGTTGCTACA |
| | GCTCACAGCGAGTTAGCAAAGGGTGTAGCTTTAGATGGTGTCCTTTCTACATTCGTGTCAGCTGCCC |
| | GACAAGGTGTTGTTGATACCGATGTTGACACAAAGGATGTTATTGAATGTCTCAAACTTTCACATCA |
| | CTCTGACTTAGAAGTGACAGGTGACAGTTGTAACAATTTCATGCTCACCTATAATAAGGTTGAAAAC |
| | ATGACGCCCAGAGATCTTGGCGCATGTATTGACTGTAATGCAAGGCATATCAATGCCCAAGTAGCAA |
| | AAAGTCACAATGTTTCACTCATCTGGAATGTAAAAGACTACATGTCTTTATCTGAACAGCTGCGTAA |
| | ACAAATTCGTAGTGCTGCCAAGAAGAACAACATACCTTTTAGACTAACTTGTGCTACAACTAGACAG |
| | GTTGTCAATGTCATAACTACTAAAATCTCACTCAAGGGTGGTAAGATTGTTAGTACTTGTTTTAAAC |
| | TTATGCTTAAGGCCACATTATTGTGCGTTCTTGCTGCATTGGTTTGTTATATCGTTATGCCAGTACA |
| | TACATTGTCAATCCATGATGGTTACACAAATGAAATCATTGGTTACAAAGCCATTCAGGATGGTGTC |
| | ACTCGTGACATCATTTCTACTGATGATTGTTTTGCAAATAAACATGCTGGTTTTGACGCATGGTTTA |
| | GCCAGCGTGGTGGTTCATACAAAAATGACAAAAGCTGCCCTGTAGTAGCTGCTATCATTACAAGAGA |
| | GATTGGTTTCATAGTGCCTGGCTTACCGGGTACTGTGCTGAGAGCAATCAATGGTGACTTCTTGCAT |
| | TTTCTACCTCGTGTTTTTAGTGCTGTTGGCAACATTTGCTACACACCTTCCAAACTCATTGAGTATA |
| | GTGATTTTGCTACCTCTGCTTGCGTTCTTGCTGCTGAGTGTACAATTTTTAAGGATGCTATGGGCAA |
| | ACCTGTGCCATATTGTTATGACACTAATTTGCTAGAGGGTTCTATTTCTTATAGTGAGCTTCGTCCA |
| | GACACTCGTTATGTGCTTATGGATGGTTCCATCATACAGTTTCCTAACACTTACCTGGAGGGTTCTG |
| | TTAGAGTAGTAACAACTTTTGATGCTGAGTACTGTAGACATGGTACATGCGAAAGGTCAGAAGTAGG |
| | TATTTGCCTATCTACCAGTGGTAGATGGGTTCTTAATAATGAGCATTACAGAGCTCTATCAGGAGTT |
| | TTCTGTGGTGTTGATGCGATGAATCTCATAGCTAACATCTTTACTCCTCTTGTGCAACCTGTGGGTG |
| | CTTTAGATGTGTCTGCTTCAGTAGTGGCTGGTGGTATTATTGCCATATTGGTGACTTGTGCTGCCTA |
| | CTACTTTATGAAATTCAGACGTGTTTTTGGTGAGTACAACCATGTTGTTGCTGCTAATGCACTTTTG |
| | TTTTTGATGTCTTTCACTATACTCTGTCTGGTACCAGCTTACAGCTTTCTGCCGGGAGTCTACTCAG |
| | TCTTTTACTTGTACTTGACATTCTATTTCACCAATGATGTTTCATTCTTGGCTCACCTTCAATGGTT |
| | TGCCATGTTTTCTCCTATTGTGCCTTTTTGGATAACAGCAATCTATGTATTCTGTATTTCTCTGAAG |
| | CACTGCCATTGGTTCTTTAACAACTATCTTAGGAAAAGAGTCATGTTTAATGGAGTTACATTTAGTA |
| | CCTTCGAGGAGGCTGCTTTGTGTACCTTTTTGCTCAACAAGGAAATGTACCTAAAATTGCGTAGCGA |
| | GACACTGTTGCCACTTACACAGTATAACAGGTATCTTGCTCTATATAACAAGTACAAGTATTTCAGT |
| | GGAGCCTTAGATACTACCAGCTATCGTGAAGCAGCTTGCTGCCACTTAGCAAAGGCTCTAAATGACT |
| | TTAGCAACTCAGGTGCTGATGTTCTCTACCAACCACCACAGACATCAATCACTTCTGCTGTTCTGCA |
| | GAGTGGTTTTAGGAAAATGGCATTCCCGTCAGGCAAAGTTGAAGGGTGCATGGTACAAGTAACCTGT |
| | GGAACTACAACTCTTAATGGATTGTGGTTGGATGACACAGTATACTGTCCAAGACATGTCATTTGCA |
| | CAGCAGAAGACATGCTTAATCCTAACTATGAAGATCTGCTCATTCGCAAATCCAACCATAGCTTTCT |
| | TGTTCAGGCTGGCAATGTTCAACTTCGTGTTATTGGCCATTCTATGCAAAATTGTCTGCTTAGGCTT |
| | AAAGTTGATACTTCTAACCCTAAGACACCCAAGTATAAATTTGTCCGTATCCAACCTGGTCAAACAT |
| | TTTCAGTTCTAGCATGCTACAATGGTTCACCATCTGGTGTTTATCAGTGTGCCATGAGACCTAATCA |
| | TACCATTAAAGGTTCTTTCCTTAATGGATCATGTGGTAGTGTTGGTTTTAACATTGATTATGATTGC |
| | GTGTCTTTCTGCTATATGCATCATATGGAGCTTCCAACAGGAGTACACGCTGGTACTGACTTAGAAG |
| | GTAAATTCTATGGTCCATTTGTTGACAGACAAACTGCACAGGCTGCAGGTACAGACACAACCATAAC |
| | ATTAAATGTTTTGGCATGGCTGTATGCTGCTGTTATCAATGGTGATAGGTGGTTTCTTAATAGATTC |
| | ACCACTACTTTGAATGACTTTAACCTTGTGGCAATGAAGTACAACTATGAACCTTTGACACAAGATC |
| | ATGTTGACATATTGGGACCTCTTTCTGCTCAAACAGGAATTGCCGTCTTAGATATGTGTGCTGCTTT |
| | GAAAGAGCTGCTGCAGAATGGTATGAATGGTCGTACTATCCTTGGTAGCACTATTTTAGAAGATGAG |
| | TTTACACCATTTGATGTTGTTAGACAATGCTCTGGTGTTACCTTCCAAGGTAAGTTCAAGAAAATTG |
| | TTAAGGGCACTCATCATTGGATGCTTTTAACTTTCTTGACATCACTATTGATTCTTGTTCAAAGTAC |
| | ACAGTGGTCACTGTTTTTCTTTGTTTACGAGAATGCTTTCTTGCCATTTACTCTTGGTATTATGGCA |
| | ATTGCTGCATGTGCTATGCTGCTTGTTAAGCATAAGCACGCATTCTTGTGCTTGTTTCTGTTACCTT |
| | CTCTTGCAACAGTTGCTTACTTTAATATGGTCTACATGCCTGCTAGCTGGGTGATGCGTATCATGAC |
| | ATGGCTTGAATTGGCTGACACTAGCTTGTCTGGTTATAGGCTTAAGGATTGTGTTATGTATGCTTCA |
| | GCTTTAGTTTTGCTTATTCTCATGACAGCTCGCACTGTTTATGATGATGCTGCTAGACGTGTTTGGA |
| | CACTGATGAATGTCATTACACTTGTTTACAAAGTCTACTATGGTAATGCTTTAGATCAAGCTATTTC |
| | CATGTGGGCCTTAGTTATTTCTGTAACCTCTAACTATTCTGGTGTCGTTACGACTATCATGTTTTTA |
| | GCTAGAGCTATAGTGTTTGTGTGTGTTGAGTATTACCCATTGTTATTTATTACTGGCAACACCTTAC |
| | AGTGTATCATGCTTGTTTATTGTTTCTTAGGCTATTGTTGCTGCTGCTACTTTGGCCTTTTCTGTTT |
| | ACTCAACCGTTACTTCAGGCTTACTCTTGGTGTTTATGACTACTTGGTCTCTACACAAGAATTTAGG |
| | TATATGAACTCCCAGGGGCTTTTGCCTCCTAAGAGTAGTATTGATGCTTTCAAGCTTAACATTAAGT |
| | TGTTGGGTATTGGAGGTAAACCATGTATCAAGGTTGCTACTGTACAGTCTAAAATGTCTGACGTAAA |
| | GTGCACATCTGTGGTACTGCTCTCGGTTCTTCAACAACTTAGAGTAGAGTCATCTTCTAAATTGTGG |
| | GCACAATGTGTACAACTCCACAATGATATTCTTCTTGCAAAAGACACAACTGAAGCTTTCGAGAAGA |
| | TGGTTTCTCTTTTGTCTGTTTTGCTATCCATGCAGGGTGCTGTAGACATTAATAGGTTGTGCGAGGA |
| | AATGCTCGATAACCGTGCTACTCTTCAGGCTATTGCTTCAGAATTTAGTTCTTTACCATCATATGCC |
| | GCTTATGCCACTGCCCAGGAGGCCTATGAGCAGGCTGTAGCTAATGGTGATTCTGAAGTCGTTCTCA |
| | AAAAGTTAAAGAAATCTTTGAATGTGGCTAAATCTGAGTTTGACCGTGATGCTGCCATGCAACGCAA |
| | GTTGGAAAAGATGGCAGATCAGGCTATGACCCAAATGTACAAACAGGCAAGATCTGAGGACAAGAGG |
| | GCAAAAGTAACTAGTGCTATGCAAACAATGCTCTTCACTATGCTTAGGAAGCTTGATAATGATGCAC |
| | TTAACAACATTATCAACAATGCGCGTGATGGTTGTGTTCCACTCAACATCATACCATTGACTACAGC |
| | AGCCAAACTCATGGTTGTTGTCCCTGATTATGGTACCTACAAGAACACTTGTGATGGTAACACCTTT |
| | ACATATGCATCTGCACTCTGGGAAATCCAGCAAGTTGTTGATGCGGATAGCAAGATTGTTCAACTTA |
| | GTGAAATTAACATGGACAATTCACCAAATTTGGCTTGGCCTCTTATTGTTACAGCTCTAAGAGCCAA |
| | CTCAGCTGTTAAACTACAGAATAATGAACTGAGTCCAGTAGCACTACGACAGATGTCCTGTGCGGCT |
| | GGTACCACACAAACAGCTTGTACTGATGACAATGCACTTGCCTACTATAACAATTCGAAGGGAGGTA |
| | GGTTTGTGCTGGCATTACTATCAGACCACCAAGATCTCAAATGGGCTAGATTCCCTAAGAGTGATGG |
| | TACAGGTACAATTTACACAGAACTGGAACCACCTTGTAGGTTTGTTACAGACACACCAAAAGGGCCT |
| | AAAGTGAAATACTTGTACTTCATCAAAGGCTTAAACAACCTAAATAGAGGTATGGTGCTGGGCAGTT |
| | TAGCTGCTACAGTACGTCTTCAGGCTGGAAATGCTACAGAAGTACCTGCCAATTCAACTGTGCTTTC |
| | CTTCTGTGCTTTTGCAGTAGACCCTGCTAAAGCATATAAGGATTACCTAGCAAGTGGAGGACAACCA |
| | ATCACCAACTGTGTGAAGATGTTGTGTACACACACTGGTACAGGACAGGCAATTACTGTAACACCAG |
| | AAGCTAACATGGACCAAGAGTCCTTTGGTGGTGCTTCATGTTGTCTGTATTGTAGATGCCACATTGA |
| | CCATCCAAATCCTAAAGGATTCTGTGACTTGAAAGGTAAGTACGTCCAAATACCTACCACTTGTGCT |
| | AATGACCCAGTGGGTTTTACACTTAGAAACACAGTCTGTACCGTCTGCGGAATGTGGAAAGGTTATG |
| | GCTGTAGTTGTGACCAACTCCGCGAACCCTTGATGCAGTCTGCGGATGCATCAACGTTTTTAAACGG |
| | GTTTGCGGTGTAAGTGCAGCCCGTCTTACACCGTGCGGCACAGGCACTAGTACTGATGTCGTCTACA |
| | GGGCTTTTGATATTTACAACGAAAAAGTTGCTGGTTTTGCAAAGTTCCTAAAAACTAATTGCTGTCG |
| | CTTCCAGGAGAAGGATGAGGAAGGCAATTTATTAGACTCTTACTTTGTAGTTAAGAGGCATACTATG |
| | TCTAACTACCAACATGAAGAGACTATTTATAACTTGGTTAAAGATTGTCCAGCGGTTGCTGTCCATG |
| | ACTTTTTCAAGTTTAGAGTAGATGGTGACATGGTACCACATATATCACGTCAGCGTCTAACTAAATA |
| | CACAATGGCTGATTTAGTCTATGCTCTACGTCATTTTGATGAGGGTAATTGTGATACATTAAAAGAA |
| | ATACTCGTCACATACAATTGCTGTGATGATGATTATTTCAATAAGAAGGATTGGTATGACTTCGTAG |
| | AGAATCCTGACATCTTACGCGTATATGCTAACTTAGGTGAGCGTGTACGCCAATCATTATTAAAGAC |
| | TGTACAATTCTGCGATGCTATGCGTGATGCAGGCATTGTAGGCGTACTGACATTAGATAATCAGGAT |
| | CTTAATGGGAACTGGTACGATTTCGGTGATTTCGTACAAGTAGCACCAGGCTGCGGAGTTCCTATTG |
| | TGGATTCATATTACTCATTGCTGATGCCCATCCTCACTTTGACTAGGGCATTGGCTGCTGAGTCCCA |
| | TATGGATGCTGATCTCGCAAAACCACTTATTAAGTGGGATTTGCTGAAATATGATTTTACGGAAGAG |
| | AGACTTTGTCTCTTCGACCGTTATTTTAAATATTGGGACCAGACATACCATCCCAATTGTATTAACT |
| | GTTTGGATGATAGGTGTATCCTTCATTGTGCAAACTTTAATGTGTTATTTTCTACTGTGTTTCCACC |
| | TACAAGTTTTGGACCACTAGTAAGAAAAATATTTGTAGATGGTGTTCCTTTTGTTGTTTCAACTGGA |
| | TACCATTTTCGTGAGTTAGGAGTCGTACATAATCAGGATGTAAACTTACATAGCTCGCGTCTCAGTT |
| | TCAAGGAACTTTTAGTGTATGCTGCTGATCCAGCTATGCATGCAGCTTCTGGCAATTTATTGCTAGA |
| | TAAACGCACTACATGCTTTTCAGTAGCTGCACTAACAAACAATGTTGCTTTTCAAACTGTCAAACCC |
| | GGTAATTTTAATAAAGACTTTTATGACTTTGCTGTGTCTAAAGGTTTCTTTAAGGAAGGAAGTTCTG |
| | TTGAACTAAAACACTTCTTCTTTGCTCAGGATGGCAACGCTGCTATCAGTGATTATGACTATTATCG |
| | TTATAATCTGCCAACAATGTGTGATATCAGACAACTCCTATTCGTAGTTGAAGTTGTTGATAAATAC |
| | TTTGATTGTTACGATGGTGGCTGTATTAATGCCAACCAAGTAATCGTTAACAATCTGGATAAATCAG |
| | CTGGTTTCCCATTTAATAAATGGGGTAAGGCTAGACTTTATTATGACTCAATGAGTTATGAGGATCA |
| | AGATGCACTTTTCGCGTATACTAAGCGTAATGTCATCCCTACTATAACTCAAATGAATCTTAAGTAT |
| | GCCATTAGTGCAAAGAATAGAGCTCGCACCGTAGCTGGTGTCTCTATCTGTAGTACTATGACAAATA |
| | GACAGTTTCATCAGAAATTATTGAAGTCAATAGCCGCCACTAGAGGAGCTACTGTGGTAATTGGAAC |
| | AAGCAAGTTTTACGGTGGCTGGCATAATATGTTAAAAACTGTTTACAGTGATGTAGAAACTCCACAC |
| | CTTATGGGTTGGGATTATCCAAAATGTGACAGAGCCATGCCTAACATGCTTAGGATAATGGCCTCTC |
| | TTGTTCTTGCTCGCAAACATAACACTTGCTGTAACTTATCACACCGTTTCTACAGGTTAGCTAACGA |
| | GTGTGCGCAAGTATTAAGTGAGATGGTCATGTGTGGCGGCTCACTATATGTTAAACCAGGTGGAACA |
| | TCATCCGGTGATGCTACAACTGCTTATGCTAATAGTGTCTTTAACATTTGTCAAGCTGTTACAGCCA |
| | ATGTAAATGCACTTCTTTCAACTGATGGTAATAAGATAGCTGACAAGTATGTCCGCAATCTACAACA |
| | CAGGCTCTATGAGTGTCTCTATAGAAATAGGGATGTTGATCATGAATTCGTGGATGAGTTTTACGCT |
| | TACCTGCGTAAACATTTCTCCATGATGATTCTTTCTGATGATGCCGTTGTGTGCTATAACAGTAACT |
| | ATGCGGCTCAAGGTTTAGTAGCTAGCATTAAGAACTTTAAGGCAGTTCTTTATTATCAAAATAATGT |
| | GTTCATGTCTGAGGCAAAATGTTGGACTGAGACTGACCTTACTAAAGGACCTCACGAATTTTGCTCA |
| | CAGCATACAATGCTAGTTAAACAAGGAGATGATTACGTGTACCTGCCTTACCCAGATCCATCAAGAA |
| | TATTAGGCGCAGGCTGTTTTGTCGATGATATTGTCAAAACAGATGGTACACTTATGATTGAAAGGTT |
| | CGTGTCACTGGCTATTGATGCTTACCCACTTACAAAACATCCTAATCAGGAGTATGCTGATGTCTTT |
| | CACTTGTATTTACAATACATTAGAAAGTTACATGATGAGCTTACTGGCCACATGTTGGACATGTATT |
| | CCGTAATGCTAACTAATGATAACACCTCACGGTACTGGGAACCTGAGTTTTATGAGGCTATGTACAC |
| | ACCACATACAGTCTTGCAGGCTGTAGGTGCTTGTGTATTGTGCAATTCACAGACTTCACTTCGTTGC |
| | GGTGCCTGTATTAGGAGACCATTCCTATGTTGCAAGTGCTGCTATGACCATGTCATTTCAACATCAC |
| | ACAAATTAGTGTTGTCTGTTAATCCCTATGTTTGCAATGCCCCAGGTTGTGATGTCACTGATGTGAC |
| | ACAACTGTATCTAGGAGGTATGAGCTATTATTGCAAGTCACATAAGCCTCCCATTAGTTTTCCATTA |
| | TGTGCTAATGGTCAGGTTTTTGGTTTATACAAAAACACATGTGTAGGCAGTGACAATGTCACTGACT |
| | TCAATGCGATAGCAACATGTGATTGGACTAATGCTGGCGATTACATACTTGCCAACACTTGTACTGA |
| | GAGACTCAAGCTTTTCGCAGCAGAAACGCTCAAAGCCACTGAGGAAACATTTAAGCTGTCATATGGT |
| | ATTGCTACTGTACGCGAAGTACTCTCTGACAGAGAATTGCATCTTTCATGGGAGGTTGGAAAACCTA |
| | GACCACCATTGAACAGAAACTATGTCTTTACTGGTTACCGTGTAACTAAAAATAGTAAAGTACAGAT |
| | TGGAGAGTACACCTTTGAAAAAGGTGACTATGGTGATGCTGTTGTGTACAGAGGTACTACGACATAC |
| | AAGTTGAATGTTGGTGATTACTTTGTGTTGACATCTCACACTGTAATGCCACTTAGTGCACCTACTC |
| | TAGTGCCACAAGAGCACTATGTGAGAATTACTGGCTTGTACCCAACACTCAACATCTCAGATGAGTT |
| | TTCTAGCAATGTTGCAAATTATCAAAAGGTCGGCATGCAAAAGTACTCTACACTCCAAGGACCACCT |
| | GGTACTGGTAAGAGTCATTTTGCCATCGGACTTGCTCTCTATTACCCATCTGCTCGCATAGTGTATA |
| | CGGCATGCTCTCATGCAGCTGTTGATGCCCTATGTGAAAAGGCATTAAAATATTTGCCCATAGATAA |
| | ATGTAGTAGAATCATACCTGCGCGTGCGCGCGTAGAGTGTTTTGATAAATTCAAAGTGAATTCAACA |
| | CTAGAACAGTATGTTTTCTGCACTGTAAATGCATTGCCAGAAACAACTGCTGACATTGTAGTCTTTG |
| | ATGAAATCTCTATGGCTACTAATTATGACTTGAGTGTTGTCAATGCTAGACTTCGTGCAAAACACTA |
| | CGTCTATATTGGCGATCCTGCTCAATTACCAGCCCCCCGCACATTGCTGACTAAAGGCACACTAGAA |
| | CCAGAATATTTTAATTCAGTGTGCAGACTTATGAAAACAATAGGTCCAGACATGTTCCTTGGAACTT |
| | GTCGCCGTTGTCCTGCTGAAATTGTTGACACTGTGAGTGCTTTAGTTTATGACAATAAGCTAAAAGC |
| | ACACAAGGATAAGTCAGCTCAATGCTTCAAAATGTTCTACAAAGGTGTTATTACACATGATGTTTCA |
| | TCTGCAATCAACAGACCTCAAATAGGCGTTGTAAGAGAATTTCTTACACGCAATCCTGCTTGGAGAA |
| | AAGCTGTTTTTATCTCACCTTATAATTCACAGAACGCTGTAGCTTCAAAAATCTTAGGATTGCCTAC |
| | GCAGACTGTTGATTCATCACAGGGTTCTGAATATGACTATGTCATATTCACACAAACTACTGAAACA |
| | GCACACTCTTGTAATGTCAACCGCTTCAATGTGGCTATCACAAGGGCAAAAATTGGCATTTTGTGCA |
| | TAATGTCTGATAGAGATCTTTATGACAAACTGCAATTTACAAGTCTAGAAATACCACGTCGCAATGT |
| | GGCTACATTACAAGCAGAAAATGTAACTGGACTTTTTAAGGACTGTAGTAAGATCATTACTGGTCTT |
| | CATCCTACACAGGCACCTACACACCTCAGCGTTGATATAAAGTTCAAGACTGAAGGATTATGTGTTG |
| | ACATACCAGGCATACCAAAGGACATGACCTACCGTAGACTCATCTCTATGATGGGTTTCAAAATGAA |
| | TTACCAAGTCAATGGTTACCCTAATATGTTTATCACCCGCGAAGAAGCTATTCGTCACGTTCGTGCG |
| | TGGATTGGCTTTGATGTAGAGGGCTGTCATGCAACTAGAGATGCTGTGGGTACTAACCTACCTCTCC |
| | AGCTAGGATTTTCTACAGGTGTTAACTTAGTAGCTGTACCGACTGGTTATGTTGACACTGAAAATAA |
| | CACAGAATTCACCAGAGTTAATGCAAAACCTCCACCAGGTGACCAGTTTAAACATCTTATACCACTC |
| | ATGTATAAAGGCTTGCCCTGGAATGTAGTGCGTATTAAGATAGTACAAATGCTCAGTGATACACTGA |
| | AAGGATTGTCAGACAGAGTCGTGTTCGTCCTTTGGGCGCATGGCTTTGAGCTTACATCAATGAAGTA |
| | CTTTGTCAAGATTGGACCTGAAAGAACGTGTTGTCTGTGTGACAAACGTGCAACTTGCTTTTCTACT |
| | TCATCAGATACTTATGCCTGCTGGAATCATTCTGTGGGTTTTGACTATGTCTATAACCCATTTATGA |
| | TTGATGTTCAGCAGTGGGGCTTTACGGGTAACCTTCAGAGTAACCATGACCAACATTGCCAGGTACA |
| | TGGAAATGCACATGTGGCTAGTTGTGATGCTATCATGACTAGATGTTTAGCAGTCCATGAGTGCTTT |
| | GTTAAGCGCGTTGATTGGTCTGTTGAATACCCTATTATAGGAGATGAACTGAGGGTTAATTCTGCTT |
| | GCAGAAAAGTACAACACATGGTTGTGAAGTCTGCATTGCTTGCTGATAAGTTTCCAGTTCTTCATGA |
| | CATTGGAAATCCAAAGGCTATCAAGTGTGTGCCTCAGGCTGAAGTAGAATGGAAGTTCTACGATGCT |
| | CAGCCATGTAGTGACAAAGCTTACAAAATAGAGGAGCTCTTCTATTCTTATGCTACACATCACGATA |
| | AATTCACTGATGGTGTTTGTTTGTTTTGGAATTGTAACGTTGATCGTTACCCAGCCAATGCAATTGT |
| | GTGTAGGTTTGACACAAGAGTCTTGTCAAACTTGAACTTACCAGGCTGTGATGGTGGTAGTTTGTAT |
| | GTGAATAAGCATGCATTCCACACTCCAGCTTTCGATAAAAGTGCATTTACTAATTTAAAGCAATTGC |
| | CTTTCTTTTACTATTCTGATAGTCCTTGTGAGTCTCATGGCAAACAAGTAGTGTCGGATATTGATTA |
| | TGTTCCACTCAAATCTGCTACGTGTATTACACGATGCAATTTAGGTGGTGCTGTTTGCAGACACCAT |
| | GCAAATGAGTACCGACAGTACTTGGATGCATATAATATGATGATTTCTGCTGGATTTAGCCTATGGA |
| | TTTACAAACAATTTGATACTTATAACCTGTGGAATACATTTACCAGGTTACAGAGTTTAGAAAATGT |
| | GGCTTATAATGTTGTTAATAAAGGACACTTTGATGGACACGCCGGCGAAGCACCTGTTTCCATCATT |
| | AATAATGCTGTTTACACAAAGGTAGATGGTATTGATGTGGAGATCTTTGAAAATAAGACAACACTTC |
| | CTGTTAATGTTGCATTTGAGCTTTGGGCTAAGCGTAACATTAAACCAGTGCCAGAGATTAAGATACT |
| | CAATAATTTGGGTGTTGATATCGCTGCTAATACTGTAATCTGGGACTACAAAAGAGAAGCCCCAGCA |
| | CATGTATCTACAATAGGTGTCTGCACAATGACTGACATTGCCAAGAAACCTACTGAGAGTGCTTGTT |
| | CTTCACTTACTGTCTTGTTTGATGGTAGAGTGGAAGGACAGGTAGACCTTTTTAGAAACGCCCGTAA |
| | TGGTGTTTTAATAACAGAAGGTTCAGTCAAAGGTCTAACACCTTCAAAGGGACCAGCACAAGCTAGC |
| | GTCAATGGAGTCACATTAATTGGAGAATCAGTAAAAACACAGTTTAACTACTTTAAGAAAGTAGACG |
| | GCATTATTCAACAGTTGCCTGAAACCTACTTTACTCAGAGCAGAGACTTAGAGGATTTTAAGCCCAG |
| | ATCACAAATGGAAACTGACTTTCTCGAGCTCGCTATGGATGAATTCATACAGCGATATAAGCTCGAG |
| | GGCTATGCCTTCGAACACATCGTTTATGGAGATTTCAGTCATGGACAACTTGGCGGTCTTCATTTAA |
| | TGATAGGCTTAGCCAAGCGCTCACAAGATTCACCACTTAAATTAGAGGATTTTATCCCTATGGACAG |
| | CACAGTGAAAAATTACTTCATAACAGATGCGCAAACAGGTTCATCAAAATGTGTGTGTTCTGTGATT |
| | GATCTTTTACTTGATGACTTTGTCGAGATAATAAAGTCACAAGATTTGTCAGTGATTTCAAAAGTGG |
| | TCAAGGTTACAATTGACTATGCTGAAATTTCATTCATGCTTTGGTGTAAGGATGGACATGTTGAAAC |
| | CTTCTACCCAAAACTACAAGCAAGTCAAGCGTGGCAACCAGGTGTTGCGATGCCTAACTTGTACAAG |
| | ATGCAAAGAATGCTTCTTGAAAAGTGTGACCTTCAGAATTATGGTGAAAATGCTGTTATACCAAAAG |
| | GAATAATGATGAATGTCGCAAAGTATACTCAACTGTGTCAATACTTAAATACACTTACTTTAGCTGT |
| | ACCCTACAACATGAGAGTTATTCACTTTGGTGCTGGCTCTGATAAAGGAGTTGCACCAGGTACAGCT |
| | GTGCTCAGACAATGGTTGCCAACTGGCACACTACTTGTCGATTCAGATCTTAATGACTTCGTCTCCG |
| | ACGCAGATTCTACTTTAATTGGAGACTGTGCAACAGTACATACGGCTAATAAATGGGACCTTATTAT |
| | TAGCGATATGTATGACCCTAGGACCAAACATGTGACAAAAGAGAATGACTCTAAAGAAGGGTTTTTC |
| | ACTTATCTGTGTGGATTTATAAAGCAAAAACTAGCCCTGGGTGGTTCTATAGCTGTAAAGATAACAG |
| | AGCATTCTTGGAATGCTGACCTTTACAAGCTTATGGGCCATTTCTCATGGTGGACAGCTTTTGTTAC |
| | AAATGTAAATGCATCATCATCGGAAGCATTTTTAATTGGGGCTAACTATCTTGGCAAGCCGAAGGAA |
| | CAAATTGATGGCTATACCATGCATGCTAACTACATTTTCTGGAGGAACACAAATCCTATCCAGTTGT |
| | CTTCCTATTCACTCTTTGACATGAGCAAATTTCCTCTTAAATTAAGAGGAACTGCTGTAATGTCTCT |
| | TAAGGAGAATCAAATCAATGATATGATTTATTCTCTTCTGGAAAAAGGTAGGCTTATCATTAGAGAA |
| | AACAACAGAGTTGTGGTTTCAAGTGATATTCTTGTTAACAACTAAACGAACATGTTTATTTTCTTAT |
| | TATTTCTTACTCTCACTAGTGGTAGTGACCTTGACCGGTGCACCACTTTTGATGATGTTCAAGCTCC |
| | TAATTACACTCAACATACTTCATCTATGAGGGGGGTTTACTATCCTGATGAAATTTTTAGATCAGAC |
| | ACTCTTTATTTAACTCAGGATTTATTTCTTCCATTTTATTCTAATGTTACAGGGTTTCATACTATTA |
| | ATCATACGTTTGGCAACCCTGTCATACCTTTTAAGGATGGTATTTATTTTGCTGCCACAGAGAAATC |
| | AAATGTTGTCCGTGGTTGGGTTTTTGGTTCTACCATGAACAACAAGTCACAGTCGGTGATTATTATT |
| | AACAATTCTACTAATGTTGTTATACGAGCATGTAACTTTGAATTGTGTGACAACCCTTTCTTTGCTG |
| | TTTCTAAACCCATGGGTACACAGACACATACTATGATATTCGATAATGCATTTAATTGCACTTTCGA |
| | GTACATATCTGATGCCTTTTCGCTTGATGTTTCAGAAAAGTCAGGTAATTTTAAACACTTACGAGAG |
| | TTTGTGTTTAAAAATAAAGATGGGTTTCTCTATGTTTATAAGGGCTATCAACCTATAGATGTAGTTC |
| | GTGATCTACCTTCTGGTTTTAACACTTTGAAACCTATTTTTAAGTTGCCTCTTGGTATTAACATTAC |
| | AAATTTTAGAGCCATTCTTACAGCCTTTTCACCTGCTCAAGACATTTGGGGCACGTCAGCTGCAGCC |
| | TATTTTGTTGGCTATTTAAAGCCAACTACATTTATGCTCAAGTATGATGAAAATGGTACAATCACAG |
| | ATGCTGTTGATTGTTCTCAAAATCCACTTGCTGAACTCAAATGCTCTGTTAAGAGCTTTGAGATTGA |
| | CAAAGGAATTTACCAGACCTCTAATTTCAGGGTTGTTCCCTCAGGAGATGTTGTGAGATTCCCTAAT |
| | ATTACAAACTTGTGTCCTTTTGGAGAGGTTTTTAATGCTACTAAATTCCCTTCTGTCTATGCATGGG |
| | AGAGAAAAAAAATTTCTAATTGTGTTGCTGATTACTCTGTGCTCTACAACTCAACATTTTTTTCAAC |
| | CTTTAAGTGCTATGGCGTTTCTGCCACTAAGTTGAATGATCTTTGCTTCTCCAATGTCTATGCAGAT |
| | TCTTTTGTAGTCAAGGGAGATGATGTAAGACAAATAGCGCCAGGACAAACTGGTGTTATTGCTGATT |
| | ATAATTATAAATTGCCAGATGATTTCATGGGTTGTGTCCTTGCTTGGAATACTAGGAACATTGATGC |
| | TACTTCAACTGGTAATTATAATTATAAATATAGGTATCTTAGACATGGCAAGCTTAGGCCCTTTGAG |
| | AGAGACATATCTAATGTGCCTTTCTCCCCTGATGGCAAACCTTGCACCCCACCTGCTCTTAATTGTT |
| | ATTGGCCATTAAATGATTATGGTTTTTACACCACTACTGGCATTGGCTACCAACCTTACAGAGTTGT |
| | AGTACTTTCTTTTGAACTTTTAAATGCACCGGCCACGGTTTGTGGACCAAAATTATCCACTGACCTT |
| | ATTAAGAACCAGTGTGTCAATTTTAATTTTAATGGACTCACTGGTACTGGTGTGTTAACTCCTTCTT |
| | CAAAGAGATTTCAACCATTTCAACAATTTGGCCGTGATGTTTCTGATTTCACTGATTCCGTTCGAGA |
| | TCCTAAAACATCTGAAATATTAGACATTTCACCTTGCTCTTTTGGGGGTGTAAGTGTAATTACACCT |
| | GGAACAAATGCTTCATCTGAAGTTGCTGTTCTATATCAAGATGTTAACTGCACTGATGTTTCTACAG |
| | CAATTCATGCAGATCAACTCACACCAGCTTGGCGCATATATTCTACTGGAAACAATGTATTCCAGAC |
| | TCAAGCAGGCTGTCTTATAGGAGCTGAGCATGTCGACACTTCTTATGAGTGCGACATTCCTATTGGA |
| | GCTGGCATTTGTGCTAGTTACCATACAGTTTCTTTATTACGTAGTACTAGCCAAAAATCTATTGTGG |
| | CTTATACTATGTCTTTAGGTGCTGATAGTTCAATTGCTTACTCTAATAACACCATTGCTATACCTAC |
| | TAACTTTTCAATTAGCATTACTACAGAAGTAATGCCTGTTTCTATGGCTAAAACCTCCGTAGATTGT |
| | AATATGTACATCTGCGGAGATTCTACTGAATGTGCTAATTTGCTTCTCCAATATGGTAGCTTTTGCA |
| | CACAACTAAATCGTGCACTCTCAGGTATTGCTGCTGAACAGGATCGCAACACACGTGAAGTGTTCGC |
| | TCAAGTCAAACAAATGTACAAAACCCCAACTTTGAAATATTTTGGTGGTTTTAATTTTTCACAAATA |
| | TTACCTGACCCTCTAAAGCCAACTAAGAGGTCTTTTATTGAGGACTTGCTCTTTAATAAGGTGACAC |
| | TCGCTGATGCTGGCTTCATGAAGCAATATGGCGAATGCCTAGGTGATATTAATGCTAGAGATCTCAT |
| | TTGTGCGCAGAAGTTCAATGGACTTACAGTGTTGCCACCTCTGCTCACTGATGATATGATTGCTGCC |
| | TACACTGCTGCTCTAGTTAGTGGTACTGCCACTGCTGGATGGACATTTGGTGCTGGCGCTGCTCTTC |
| | AAATACCTTTTGCTATGCAAATGGCATATAGGTTCAATGGCATTGGAGTTACCCAAAATGTTCTCTA |
| | TGAGAACCAAAAACAAATCGCCAACCAATTTAACAAGGCGATTAGTCAAATTCAAGAATCACTTACA |
| | ACAACATCAACTGCATTGGGCAAGCTGCAAGACGTTGTTAACCAGAATGCTCAAGCATTAAACACAC |
| | TTGTTAAACAACTTAGCTCTAATTTTGGTGCAATTTCAAGTGTGCTAAATGATATCCTTTCGCGACT |
| | TGATAAAGTCGAGGCGGAGGTACAAATTGACAGGTTAATTACAGGCAGACTTCAAAGCCTTCAAACC |
| | TATGTAACACAACAACTAATCAGGGCTGCTGAAATCAGGGCTTCTGCTAATCTTGCTGCTACTAAAA |
| | TGTCTGAGTGTGTTCTTGGACAATCAAAAAGAGTTGACTTTTGTGGAAAGGGCTACCACCTTATGTC |
| | CTTCCCACAAGCAGCCCCGCATGGTGTTGTCTTCCTACATGTCACGTATGTGCCATCCCAGGAGAGG |
| | AACTTCACCACAGCGCCAGCAATTTGTCATGAAGGCAAAGCATACTTCCCTCGTGAAGGTGTTTTTG |
| | TGTTTAATGGCACTTCTTGGTTTATTACACAGAGGAACTTCTTTTCTCCACAAATAATTACTACAGA |
| | CAATACATTTGTCTCAGGAAATTGTGATGTCGTTATTGGCATCATTAACAACACAGTTTATGATCCT |
| | CTGCAACCTGAGCTCGACTCATTCAAAGAAGAGCTGGACAAGTACTTCAAAAATCATACATCACCAG |
| | ATGTTGATCTTGGCGACATTTCAGGCATTAACGCTTCTGTCGTCAACATTCAAAAAGAAATTGACCG |
| | CCTCAATGAGGTCGCTAAAAATTTAAATGAATCACTCATTGACCTTCAAGAATTGGGAAAATATGAG |
| | CAATATATTAAATGGCCTTGGTATGTTTGGCTCGGCTTCATTGCTGGACTAATTGCCATCGTCATGG |
| | TTACAATCTTGCTTTGTTGCATGACTAGTTGTTGCAGTTGCCTCAAGGGTGCATGCTCTTGTGGTTC |
| | TTGCTGCAAGTTTGATGAGGATGACTCTGAGCCAGTTCTCAAGGGTGTCAAATTACATTACACATAA |
| | ACGAACTTATGGATTTGTTTATGAGATTTTTTACTCTTGGATCAATTACTGCACAGCCAGTAAAAAT |
| | TGACAATGCTTCTCCTGCAAGTACTGTTCATGCTACAGCAACGATACCGCTACAAGCCTCACTCCCT |
| | TTCGGATGGCTTGTTATTGGCGTTGCATTTCTTGCTGTTTTTCAGAGCGCTACCAAAATAATTGCGC |
| | TCAATAAAAGATGGCAGCTAGCCCTTTATAAGGGCTTCCAGTTCATTTGCAATTTACTGCTGCTATT |
| | TGTTACCATCTATTCACATCTTTTGCTTGTCGCTGCAGGTATGGAGGCGCAATTTTTGTACCTCTAT |
| | GCCTTGATATATTTTCTACAATGCATCAACGCATGTAGAATTATTATGAGATGTTGGCTTTGTTGGA |
| | AGTGCAAATCCAAGAACCCATTACTTTATGATGCCAACTACTTTGTTTGCTGGCACACACATAACTA |
| | TGACTACTGTATACCATATAACAGTGTCACAGATACAATTGTCGTTACTGAAGGTGACGGCATTTCA |
| | ACACCAAAACTCAAAGAAGACTACCAAATTGGTGGTTATTCTGAGGATAGGCACTCAGGTGTTAAAG |
| | ACTATGTCGTTGTACATGGCTATTTCACCGAAGTTTACTACCAGCTTGAGTCTACACAAATTACTAC |
| | AGACACTGGTATTGAAAATGCTACATTCTTCATCTTTAACAAGCTTGTTAAAGACCCACCGAATGTG |
| | CAAATACACACAATCGACGGCTCTTCAGGAGTTGCTAATCCAGCAATGGATCCAATTTATGATGAGC |
| | CGACGACGACTACTAGCGTGCCTTTGTAAGCACAAGAAAGTGAGTACGAACTTATGTACTCATTCGT |
| | TTCGGAAGAAACAGGTACGTTAATAGTTAATAGCGTACTTCTTTTTCTTGCTTTCGTGGTATTCTTG |
| | CTAGTCACACTAGCCATCCTTACTGCGCTTCGATTGTGTGCGTACTGCTGCAATATTGTTAACGTGA |
| | GTTTAGTAAAACCAACGGTTTACGTCTACTCGCGTGTTAAAAATCTGAACTCTTCTGAAGGAGTTCC |
| | TGATCTTCTGGTCTAAACGAACTAACTATTATTATTATTCTGTTTGGAACTTTAACATTGCTTATCA |
| | TGGCAGACAACGGTACTATTACCGTTGAGGAGCTTAAACAACTCCTGGAACAATGGAACCTAGTAAT |
| | AGGTTTCCTATTCCTAGCCTGGATTATGTTACTACAATTTGCCTATTCTAATCGGAACAGGTTTTTG |
| | TACATAATAAAGCTTGTTTTCCTCTGGCTCTTGTGGCCAGTAACACTTGCTTGTTTTGTGCTTGCTG |
| | CTGTCTACAGAATTAATTGGGTGACTGGCGGGATTGCGATTGCAATGGCTTGTATTGTAGGCTTGAT |
| | GTGGCTTAGCTACTTCGTTGCTTCCTTCAGGCTGTTTGCTCGTACCCGCTCAATGTGGTCATTCAAC |
| | CCAGAAACAAACATTCTTCTCAATGTGCCTCTCCGGGGGACAATTGTGACCAGACCGCTCATGGAAA |
| | GTGAACTTGTCATTGGTGCTGTGATCATTCGTGGTCACTTGCGAATGGCCGGACACCCCCTAGGGCG |
| | CTGTGACATTAAGGACCTGCCAAAAGAGATCACTGTGGCTACATCACGAACGCTTTCTTATTACAAA |
| | TTAGGAGCGTCGCAGCGTGTAGGCACTGATTCAGGTTTTGCTGCATACAACCGCTACCGTATTGGAA |
| | ACTATAAATTAAATACAGACCACGCCGGTAGCAACGACAATATTGCTTTGCTAGTACAGTAAGTGAC |
| | AACAGATGTTTCATCTTGTTGACTTCCAGGTTACAATAGCAGAGATATTGATTATCATTATGAGGAC |
| | TTTCAGGATTGCTATTTGGAATCTTGACGTTATAATAAGTTCAATAGTGAGACAATTATTTAAGCCT |
| | CTAACTAAGAAGAATTATTCGGAGTTAGATGATGAAGAACCTATGGAGTTAGATTATCCATAAAACG |
| | AACATGAAAATTATTCTCTTCCTGACATTGATTGTATTTACATCTTGCGAGCTATATCACTATCAGG |
| | AGTGTGTTAGAGGTACGACTGTACTACTAAAAGAACCTTGCCCATCAGGAACATACGAGGGCAATTC |
| | ACCATTTCACCCTCTTGCTGACAATAAATTTGCACTAACTTGCACTAGCACACACTTTGCTTTTGCT |
| | TGTGCTGACGGTACTCGACATACCTATCAGCTGCGTGCAAGATCAGTTTCACCAAAACTTTTCATCA |
| | GACAAGAGGAGGTTCAACAAGAGCTCTACTCGCCACTTTTTCTCATTGTTGCTGCTCTAGTATTTTT |
| | AATACTTTGCTTCACCATTAAGAGAAAGACAGAATGAATGAGCTCACTTTAATTGACTTCTATTTGT |
| | GCTTTTTAGCCTTTCTGCTATTCCTTGTTTTAATAATGCTTATTATATTTTGGTTTTCACTCGAAAT |
| | CCAGGATCTAGAAGAACCTTGTACCAAAGTCTAAACGAACATGAAACTTCTCATTGTTTTGACTTGT |
| | ATTTCTCTATGCAGTTGCATATGCACTGTAGTACAGCGCTGTGCATCTAATAAACCTCATGTGCTTG |
| | AAGATCCTTGTAAGGTACAACACTAGGGGTAATACTTATAGCACTGCTTGGCTTTGTGCTCTAGGAA |
| | AGGTTTTACCTTTTCATAGATGGCACACTATGGTTCAAACATGCACACCTAATGTTACTATCAACTG |
| | TCAAGATCCAGCTGGTGGTGCGCTTATAGCTAGGTGTTGGTACCTTCATGAAGGTCACCAAACTGCT |
| | GCATTTAGAGACGTACTTGTTGTTTTAAATAAACGAACAAATTAAAATGTCTGATAATGGACCCCAA |
| | TCAAACCAACGTAGTGCCCCCCGCATTACATTTGGTGGACCCACAGATTCAACTGACAATAACCAGA |
| | ATGGAGGACGCAATGGGGCAAGGCCAAAACAGCGCCGACCCCAAGGTTTACCCAATAATACTGCGTC |
| | TTGGTTCACAGCTCTCACTCAGCATGGCAAGGAGGAACTTAGATTCCCTCGAGGCCAGGGCGTTCCA |
| | ATCAACACCAATAGTGGTCCAGATGACCAAATTGGCTACTACCGAAGAGCTACCCGACGAGTTCGTG |
| | GTGGTGACGGCAAAATGAAAGAGCTCAGCCCCAGATGGTACTTCTATTACCTAGGAACTGGCCCAGA |
| | AGCTTCACTTCCCTACGGCGCTAACAAAGAAGGCATCGTATGGGTTGCAACTGAGGGAGCCTTGAAT |
| | ACACCCAAAGACCACATTGGCACCCGCAATCCTAATAACAATGCTGCCACCGTGCTACAACTTCCTC |
| | AAGGAACAACATTGCCAAAAGGCTTCTACGCAGAGGGAAGCAGAGGCGGCAGTCAAGCCTCTTCTCG |
| | CTCCTCATCACGTAGTCGCGGTAATTCAAGAAATTCAACTCCTGGCAGCAGTAGGGGAAATTCTCCT |
| | GCTCGAATGGCTAGCGGAGGTGGTGAAACTGCCCTCGCGCTATTGCTGCTAGACAGATTGAACCAGC |
| | TTGAGAGCAAAGTTTCTGGTAAAGGCCAACAACAACAAGGCCAAACTGTCACTAAGAAATCTGCTGC |
| | TGAGGCATCTAAAAAGCCTCGCCAAAAACGTACTGCCACAAAACAGTACAACGTCACTCAAGCATTT |
| | GGGAGACGTGGTCCAGAACAAACCCAAGGAAATTTCGGGGACCAAGACCTAATCAGACAAGGAACTG |
| | ATTACAAACATTGGCCGCAAATTGCACAATTTGCTCCAAGTGCCTCTGCATTCTTTGGAATGTCACG |
| | CATTGGCATGGAAGTCACACCTTCGGGAACATGGCTGACTTATCATGGAGCCATTAAATTGGATGAC |
| | AAAGATCCACAATTCAAAGACAACGTCATACTGCTGAACAAGCACATTGACGCATACAAAACATTCC |
| | CACCAACAGAGCCTAAAAAGGACAAAAAGAAAAAGACTGATGAAGCTCAGCCTTTGCCGCAGAGACA |
| | AAAGAAGCAGCCCACTGTGACTCTTCTTCCTGCGGCTGACATGGATGATTTCTCCAGACAACTTCAA |
| | AATTCCATGAGTGGAGCTTCTGCTGATTCAACTCAGGCATAAACACTCATGATGACCACACAAGGCA |
| | GATGGGCTATGTAAACGTTTTCGCAATTCCGTTTACGATACATAGTCTACTCTTGTGCAGAATGAAT |
| | TCTCGTAACTAAACAGCACAAGTAGGTTTAGTTAACTTTAATCTCACATAGCAATCTTTAATCAATG |
| | TGTAACATTAGGGAGGACTTGAAAGAGCCACCACATTTTCATCGAGGCCACGCGGAGTACGATCGAG |
| | GGTACAGTGAATAATGCTAGGGAGAGCTGCCTATATGGAAGAGCCCTAATGTGTAAAATTAATTTTA |
| | GTAGTGCTATCCCCATGTGATTTTAATAGCTTCTTAGGAGAATGAC |
| 3 | GenBank Accession No. NC_038294.1 (Betacoronavirus England 1 isolate H123990006, |
| | complete genome) |
| | ATTTAAGTGAATAGCTTGGCTATCTCACTTCCCCTCGTTCTCTTGCAGAACTTTGATTTTAACGAAC |
| | TTAAATAAAAGCCCTGTTGTTTAGCGTATTGTTGCACTTGTCTGGTGGGATTGTGGCATTAATTTGC |
| | CTGCTCATCTAGGCAGTGGACATATGCTCAACACTGGGTATAATTCTAATTGAATACTATTTTTCAG |
| | TTAGAGCGTCGTGTCTCTTGTACGTCTCGGTCACAATACACGGTTTCGTCCGGTGCGTGGCAATTCG |
| | GGGCACATCATGTCTTTCGTGGCTGGTGTGACCGCGCAAGGTGCGCGCGGTACGTATCGAGCAGCGC |
| | TCAACTCTGAAAAACATCAAGACCATGTGTCTCTAACTGTGCCACTCTGTGGTTCAGGAAACCTGGT |
| | TGAAAAACTTTCACCATGGTTCATGGATGGCGAAAATGCCTATGAAGTGGTGAAGGCCATGTTACTT |
| | AAAAAGGAGCCACTTCTCTATGTGCCCATCCGGCTGGCTGGACACACTAGACACCTCCCAGGTCCTC |
| | GTGTATACCTGGTTGAGAGGCTCATTGCTTGTGAAAATCCATTCATGGTTAACCAATTGGCTTATAG |
| | CTCTAGTGCAAATGGCAGCTTGGTTGGCACAACTTTGCAGGGCAAGCCTATTGGTATGTTCTTCCCT |
| | TATGACATCGAACTTGTCACAGGAAAGCAAAATATTCTCCTGCGCAAGTATGGCCGTGGTGGTTATC |
| | ACTACACCCCATTCCACTATGAGCGAGACAACACCTCTTGCCCTGAGTGGATGGACGATTTTGAGGC |
| | GGATCCTAAAGGCAAATATGCCCAGAATCTGCTTAAGAAGTTGATTGGCGGTGATGTCACTCCAGTT |
| | GACCAATACATGTGTGGCGTTGATGGAAAACCCATTAGTGCCTACGCATTTTTAATGGCCAAGGATG |
| | GAATAACCAAACTGGCTGATGTTGAAGCGGACGTCGCAGCACGTGCTGATGACGAAGGCTTCATCAC |
| | ATTAAAGAACAATCTATATAGATTGGTTTGGCATGTTGAGCGTAAAGACGTTCCATATCCTAAGCAA |
| | TCTATTTTTACTATTAATAGTGTGGTCCAAAAGGATGGTGTTGAAAACACTCCTCCTCACTATTTTA |
| | CTCTTGGATGCAAAATTTTAACGCTCACCCCACGCAACAAGTGGAGTGGCGTTTCTGACTTGTCCCT |
| | CAAACAAAAACTCCTTTACACCTTCTATGGTAAGGAGTCACTTGAGAACCCAACCTACATTTACCAC |
| | TCCGCATTCATTGAGTGTGGAAGTTGTGGTAATGATTCCTGGCTTACAGGGAATGCTATCCAAGGGT |
| | TTGCCTGTGGATGTGGGGCATCATATACAGCTAATGATGTCGAAGTCCAATCATCTGGCATGATTAA |
| | GCCAAATGCTCTTCTTTGTGCTACTTGCCCCTTTGCTAAGGGTGATAGCTGTTCTTCTAATTGCAAA |
| | CATTCAGTTGCTCAGTTGGTTAGTTACCTTTCTGAACGTTGTAATGTTATTGCTGATTCTAAGTCCT |
| | TCACACTTATCTTTGGTGGCGTAGCTTACGCCTACTTTGGATGTGAGGAAGGTACTATGTACTTTGT |
| | GCCTAGAGCTAAGTCTGTTGTCTCAAGGATTGGAGACTCCATCTTTACAGGCTGTACTGGCTCTTGG |
| | AACAAGGTCACTCAAATTGCTAACATGTTCTTGGAACAGACTCAGCATTCCCTTAACTTTGTGGGAG |
| | AGTTCGTTGTCAACGATGTTGTCCTCGCAATTCTCTCTGGAACCACAACTAATGTTGACAAAATACG |
| | CCAGCTTCTCAAAGGTGTCACCCTTGACAAGTTGCGTGATTATTTAGCTGACTATGACGTAGCAGTC |
| | ACTGCCGGCCCATTCATGGATAATGCTATTAATGTTGGTGGTACAGGATTACAGTATGCCGCCATTA |
| | CTGCACCTTATGTAGTTCTCACTGGCTTAGGTGAGTCCTTTAAGAAAGTTGCAACCATACCGTACAA |
| | GGTTTGCAACTCTGTTAAGGATACTCTGACTTATTATGCTCACAGCGTGTTGTACAGAGTTTTTCCT |
| | TATGACATGGATTCTGGTGTGTCATCCTTTAGTGAACTACTTTTTGATTGCGTTGATCTTTCAGTAG |
| | CTTCTACCTATTTTTTAGTCCGCCTCTTGCAAGATAAGACTGGCGACTTTATGTCTACAATTATTAC |
| | TTCCTGCCAAACTGCTGTTAGTAAGCTTCTAGATACATGTTTTGAAGCTACAGAAGCAACATTTAAC |
| | TTCTTGTTAGATTTGGCAGGATTGTTCAGAATCTTTCTTCGCAATGCCTATGTGTACACTTCACAAG |
| | GGTTTGTGGTGGTCAATGGCAAAGTTTCTACACTTGTCAAACAAGTGTTAGACTTGCTTAATAAGGG |
| | TATGCAACTTTTGCATACAAAGGTCTCCTGGGCTGGTTCTAATATCAGTGCTGTTATCTACAGCGGC |
| | AGGGAGTCTCTAATATTCCCATCGGGAACCTATTACTGTGTCACCACTAAGGCTAAGTCCGTTCAAC |
| | AAGATCTTGACGTTATTTTGCCTGGTGAGTTTTCCAAGAAGCAGTTAGGACTGCTCCAACCTACTGA |
| | CAATTCTACAACTGTTAGTGTTACTGTATCCAGTAACATGGTTGAAACTGTTGTGGGTCAACTTGAG |
| | CAAACTAATATGCATAGTCCTGATGTTATAGTAGGTGACTATGTCATTATTAGTGAAAAATTGTTTG |
| | TGCGTAGTAAGGAAGAAGACGGATTTGCCTTCTACCCTGCTTGCACTAATGGTCATGCTGTACCGAC |
| | TCTCTTTAGACTTAAGGGAGGTGCACCTGTAAAAAAAGTAGCCTTTGGCGGTGATCAAGTACATGAG |
| | GTTGCTGCTGTAAGAAGTGTTACTGTCGAGTACAACATTCATGCTGTATTAGACACACTACTTGCTT |
| | CTTCTAGTCTTAGAACCTTTGTTGTAGATAAGTCTTTGTCAATTGAGGAGTTTGCTGACGTAGTAAA |
| | GGAACAAGTCTCAGACTTGCTTGTTAAATTACTGCGTGGAATGCCGATTCCAGATTTTGATTTAGAC |
| | GATTTTATTGACGCACCATGCTATTGCTTTAACGCTGAGGGTGATGCATCTTGGTCTTCTACTATGA |
| | TCTTCTCTCTTCACCCCGTCGAGTGTGACGAGGAGTGTTCTGAAGTAGAGGCTTCAGATTTAGAAGA |
| | AGGTGAATCAGAGTGCATTTCTGAGACTTCAACTGAACAAGTTGACGTTTCTCATGAGATTTCTGAC |
| | GACGAGTGGGCTGCTGCAGTTGATGAAGCGTTCCCCCTCGATGAAGCAGAAGATGTTACTGAATCTG |
| | TGCAAGAAGAAGCACAACCAGTAGAAGTACCTGTTGAAGATATTGCGCAGGTTGTCATAGCTGACAC |
| | CTTACAGGAAACTCCTGTTGTGTCTGATACTGTTGAAGTCCCACCGCAAGTGGTGAAACTTCCGTCT |
| | GAACCTCAGACTATCCAGCCCGAGGTAAAAGAAGTTGCACCTGTCTATGAGGCTGATACCGAACAGA |
| | CACAGAGTGTTACTGTTAAACCTAAGAGGTTACGCAAAAAGCGTAATGTTGACCCTTTGTCCAATTT |
| | TGAACATAAGGTTATTACAGAGTGCGTTACCATAGTTTTAGGTGACGCAATTCAAGTAGCCAAGTGC |
| | TATGGGGAGTCTGTGTTAGTTAATGCTGCTAACACACATCTTAAGCATGGCGGTGGTATCGCTGGTG |
| | CTATTAATGCGGCTTCAAAAGGGGCTGTCCAAAAAGAGTCAGATGAGTATATTCTGGCTAAAGGGCC |
| | GTTACAAGTAGGAGATTCAGTTCTCTTGCAAGGCCATTCTCTAGCTAAGAATATCCTGCATGTCGTA |
| | GGCCCAGATGCCCGCGCTAAACAGGATGTTTCTCTCCTTAGTAAGTGCTATAAGGCTATGAATGCAT |
| | ATCCTCTTGTAGTCACTCCTCTTGTTTCAGCAGGCATATTTGGTGTAAAACCAGCTGTGTCTTTTGA |
| | TTATCTTATTAGAGAGGCTAAGACTAGAGTTTTAGTCGTCGTTAATTCCCAAGATGTCTATAAGAGT |
| | CTTACCATAGTTGACATTCCACAGAGTTTGACTTTTTCATATGATGGGTTACGTGGCGCAATACGTA |
| | AAGCTAAAGATTATGGTTTTACTGTTTTTGTGTGCACAGACAACTCTGCTAACACTAAAGTTCTTAG |
| | GAACAAGGGTGTTGATTATACTAAGAAGTTTCTTACAGTTGACGGTGTGCAATATTATTGCTACACG |
| | TCTAAGGACACTTTAGATGATATCTTACAACAGGCTAATAAGTCTGTTGGTATTATATCTATGCCTT |
| | TGGGATATGTGTCTCATGGTTTAGACTTAATTCAAGCAGGGAGTGTCGTGCGTAGAGTTAACGTGCC |
| | CTACGTGTGTCTCCTAGCTAATAAAGAGCAAGAAGCTATTTTGATGTCTGAAGACGTTAAGTTAAAC |
| | CCTTCAGAAGATTTTATAAAGCACGTCCGCACTAATGGTGGTTACAATTCTTGGCATTTAGTCGAGG |
| | GTGAACTATTGGTGCAAGACTTACGCTTAAATAAGCTCCTGCATTGGTCTGATCAAACCATATGCTA |
| | CAAGGATAGTGTGTTTTATGTTGTAAAGAATAGTACAGCTTTTCCATTTGAAACACTTTCAGCATGT |
| | CGTGCGTATTTGGATTCACGCACGACACAGCAGTTAACAATCGAAGTCTTAGTGACTGTCGATGGTG |
| | TAAATTTTAGAACAGTCGTTCTAAATAATAAGAACACTTATAGATCACAGCTTGGATGCGTTTTCTT |
| | TAATGGTGCTGATATTTCTGATACCATTCCTGATGAGAAACAGAATGGTCACAGTTTATATCTAGCA |
| | GACAATTTGACTGCTGATGAAACAAAGGCGCTTAAAGAGTTATATGGCCCCGTTGATCCTACTTTCT |
| | TACACAGATTCTATTCACTTAAGGCTGCAGTCCATAAGTGGAAGATGGTTGTGTGTGATAAGGTACG |
| | TTCTCTCAAATTGAGTGATAATAATTGTTATCTTAATGCAGTTATTATGACACTTGATTTATTGAAG |
| | GACATTAAATTTGTTATACCTGCTCTACAGCATGCATTTATGAAACATAAGGGCGGTGATTCAACTG |
| | ACTTCATAGCCCTCATTATGGCTTATGGCAATTGCACATTTGGTGCTCCAGATGATGCCTCTCGGTT |
| | ACTTCATACCGTGCTTGCAAAGGCTGAGTTATGCTGTTCTGCACGCATGGTTTGGAGAGAGTGGTGC |
| | AATGTCTGTGGCATAAAAGATGTTGTTCTACAAGGCTTAAAAGCTTGTTGTTACGTGGGTGTGCAAA |
| | CTGTTGAAGATCTGCGTGCTCGCATGACATATGTATGCCAGTGTGGTGGTGAACGTCATCGGCAAAT |
| | AGTCGAACACACCACCCCCTGGTTGCTGCTCTCAGGCACACCAAATGAAAAATTGGTGACAACCTCC |
| | ACGGCGCCTGATTTTGTAGCGTTTAATGTCTTTCAGGGCATTGAAACGGCTGTTGGCCATTATGTTC |
| | ATGCTCGCCTGAAGGGTGGTCTTATTTTAAAGTTTGACTCTGGCACCGTTAGCAAGACTTCAGACTG |
| | GAAGTGCAAGGTGACAGATGTACTTTTCCCCGGCCAAAAATACAGTAGCGATTGTAATGTCGTACGG |
| | TATTCTTTGGACGGTAATTTCAGAACAGAGGTTGATCCCGACCTATCTGCTTTCTATGTTAAGGATG |
| | GTAAATACTTTACAAGTGAACCACCCGTAACATATTCACCAGCTACAATTTTAGCTGGTAGTGTCTA |
| | CACTAATAGCTGCCTTGTATCGTCTGATGGACAACCTGGCGGTGATGCTATTAGTTTGAGTTTTAAT |
| | AACCTTTTAGGGTTTGATTCTAGTAAACCAGTCACTAAGAAATACACTTACTCCTTCTTGCCTAAAG |
| | AAGACGGCGATGTGTTGTTGGCTGAGTTTGACACTTATGACCCTATTTATAAGAATGGTGCCATGTA |
| | TAAAGGCAAACCAATTCTTTGGGTCAACAAAGCATCTTATGATACTAATCTTAATAAGTTCAATAGA |
| | GCTAGTTTGCGTCAAATTTTTGACGTAGCCCCCATTGAACTCGAAAATAAATTCACACCTTTGAGTG |
| | TGGAGTCTACACCAGTTGAACCTCCAACTGTAGATGTGGTAGCACTTCAACAGGAAATGACAATTGT |
| | CAAATGTAAGGGTTTAAATAAACCTTTCGTGAAGGACAATGTCAGTTTCGTTGCTGATGACTCAGGT |
| | ACTCCCGTTGTTGAGTATCTGTCTAAAGAAGATCTACATACATTGTATGTAGACCCTAAGTATCAAG |
| | TCATTGTCTTAAAAGACAATGTACTTTCTTCTATGCTTAGATTGCACACCGTTGAGTCAGGTGATAT |
| | TAACGTTGTTGCAGCTTCCGGATCTTTGACACGTAAAGTGAAGTTACTATTTAGGGCTTCATTTTAT |
| | TTCAAAGAATTTGCTACCCGCACTTTCACTGCTACCACTGCTGTAGGTAGTTGTATAAAGAGTGTAG |
| | TGCGGCATCTAGGTGTTACTAAAGGCATATTGACAGGCTGTTTTAGTTTTGTCAAGATGTTATTTAT |
| | GCTTCCACTAGCTTACTTTAGTGATTCAAAACTCGGCACCACAGAGGTTAAAGTGAGTGCTTTGAAA |
| | ACAGCTGGCGTTGTGACAGGTAATGTTGTAAAACAGTGTTGCACTGCTGCTGTTGATTTAAGTATGG |
| | ATAAGTTGCGCCGTGTGGATTGGAAATCAACCCTACGGTTGTTACTTATGTTATGCACAACTATGGT |
| | ATTGTTGTCTTCTGTGTATCACTTGTATGTCTTCAATCAGGTCTTATCAAGTGATGTTATGTTTGAA |
| | GATGCCCAAGGTTTGAAAAAGTTCTACAAAGAAGTTAGAGCTTACCTAGGAATCTCTTCTGCTTGTG |
| | ACGGTCTTGCTTCAGCTTATAGGGCGAATTCCTTTGATGTACCTACATTCTGCGCAAACCGTTCTGC |
| | AATGTGTAATTGGTGCTTGATTAGCCAAGATTCCATAACTCACTACCCAGCTCTTAAGATGGTTCAA |
| | ACACATCTTAGCCACTATGTTCTTAACATAGATTGGTTGTGGTTTGCATTTGAGACTGGTTTGGCAT |
| | ACATGCTCTATACCTCGGCCTTCAACTGGTTGTTGTTGGCAGGTACATTGCATTATTTCTTTGCACA |
| | GACTTCCATATTTGTAGACTGGCGGTCATACAATTATGCTGTGTCTAGTGCCTTCTGGTTATTCACC |
| | CACATTCCAATGGCGGGTTTGGTACGAATGTATAATTTGTTAGCATGCCTTTGGCTTTTACGCAAGT |
| | TTTATCAGCATGTAATCAATGGTTGCAAAGATACGGCATGCTTGCTCTGCTATAAGAGGAACCGACT |
| | TACTAGAGTTGAAGCTTCTACCGTTGTCTGTGGTGGAAAACGTACGTTTTATATCACAGCAAATGGC |
| | GGTATTTCATTCTGTCGTAGGCATAATTGGAATTGTGTGGATTGTGACACTGCAGGTGTGGGGAATA |
| | CCTTCATCTGTGAAGAAGTCGCAAATGACCTCACTACCGCCCTACGCAGGCCTATTAACGCTACGGA |
| | TAGATCACATTATTATGTGGATTCCGTTACAGTTAAAGAGACTGTTGTTCAGTTTAATTATCGTAGA |
| | GACGGTCAACCATTCTACGAGCGGTTTCCCCTCTGCGCTTTTACAAATCTAGATAAGTTGAAGTTCA |
| | AAGAGGTCTGTAAAACTACTACTGGTATACCTGAATACAACTTTATCATCTACGACTCATCAGATCG |
| | TGGCCAGGAAAGTTTAGCTAGGTCTGCATGTGTTTATTATTCTCAAGTCTTGTGTAAATCAATTCTT |
| | TTGGTTGACTCAAGTTTGGTTACTTCTGTTGGTGATTCTAGTGAAATCGCCACTAAAATGTTTGATT |
| | CCTTTGTTAATAGTTTCGTCTCGCTGTATAATGTCACACGCGATAAGTTGGAAAAACTTATCTCTAC |
| | TGCTCGTGATGGCGTAAGGCGAGGCGATAACTTCCATAGTGTCTTAACAACATTCATTGACGCAGCA |
| | CGAGGCCCCGCAGGTGTGGAGTCTGATGTTGAGACCAATGAAATTGTTGACTCTGTGCAGTATGCTC |
| | ATAAACATGACATACAAATTACTAATGAGAGTTACAATAATTATGTACCCTCATATGTTAAACCTGA |
| | TAGTGTGTCTACCAGTGATTTAGGTAGTCTCATTGATTGTAATGCGGCTTCAGTTAACCAAATTGTC |
| | TTGCGTAATTCTAATGGTGCTTGTATTTGGAACGCTGCTGCATATATGAAACTCTCGGATGCACTTA |
| | AACGACAGATTCGCATTGCATGCCGTAAGTGTAATTTAGCTTTCCGGTTAACCACCTCAAAGCTACG |
| | CGCTAATGATAATATCTTATCAGTTAGATTCACTGCTAACAAAATTGTTGGTGGTGCTCCTACATGG |
| | TTTAATGCGTTGCGTGACTTTACGTTAAAGGGTTACGTTCTTGCTACCATTATTGTGTTTCTGTGTG |
| | CTGTACTGATGTATTTGTGTTTACCTACATTTTCTATGGTACCTGTTGAATTTTATGAAGACCGCAT |
| | CTTGGACTTTAAAGTTCTTGATAATGGTATCATTAGGGATGTAAATCCTGATGATAAGTGCTTTGCT |
| | AATAAGCACCGGTCCTTCACACAATGGTATCATGAGCATGTTGGTGGTGTCTATGACAACTCTATCA |
| | CATGCCCATTGACAGTTGCAGTAATTGCTGGAGTTGCTGGTGCTCGCATTCCAGACGTACCTACTAC |
| | ATTGGCTTGGGTGAACAATCAGATAATTTTCTTTGTTTCTCGAGTCTTTGCTAATACAGGCAGTGTT |
| | TGCTACACTCCTATAGATGAGATACCCTATAAGAGTTTCTCTGATAGTGGTTGCATTCTTCCATCTG |
| | AGTGCACTATGTTTAGGGATGCAGAGGGCCGTATGACACCATACTGCCATGATCCTACTGTTTTGCC |
| | TGGGGCTTTTGCGTACAGTCAGATGAGGCCTCATGTTCGTTACGACTTGTATGATGGTAACATGTTT |
| | ATTAAATTTCCTGAAGTAGTATTTGAAAGTACACTTAGGATTACTAGAACTCTGTCAACTCAGTACT |
| | GCCGGTTCGGTAGTTGTGAGTATGCACAAGAGGGTGTTTGTATTACCACAAATGGCTCGTGGGCCAT |
| | TTTTAATGACCACCATCTTAATAGACCTGGTGTCTATTGTGGCTCTGATTTTATTGACATTGTCAGG |
| | CGGTTAGCAGTATCACTGTTCCAGCCTATTACTTATTTCCAATTGACTACCTCATTGGTCTTGGGTA |
| | TAGGTTTGTGTGCGTTCCTGACTTTGCTCTTCTATTATATTAATAAAGTAAAACGTGCTTTTGCAGA |
| | TTACACCCAGTGTGCTGTAATTGCTGTTGTTGCTGCTGTTCTTAATAGCTTGTGCATCTGCTTTGTT |
| | GCCTCTATACCATTGTGTATAGTACCTTACACTGCATTGTACTATTATGCTACATTCTATTTTACTA |
| | ATGAGCCTGCATTTATTATGCATGTTTCTTGGTACATTATGTTCGGGCCTATCGTTCCCATATGGAT |
| | GACCTGCGTCTATACAGTTGCAATGTGCTTTAGACACTTCTTCTGGGTTTTAGCTTATTTTAGTAAG |
| | AAACATGTAGAAGTTTTTACTGATGGTAAGCTTAATTGTAGTTTCCAGGACGCTGCCTCTAATATCT |
| | TTGTTATTAACAAGGACACTTATGCAGCTCTTAGAAACTCTTTAACTAATGATGCCTATTCACGATT |
| | TTTGGGGTTGTTTAACAAGTATAAGTACTTCTCTGGTGCTATGGAAACAGCCGCTTATCGTGAAGCT |
| | GCAGCATGTCATCTTGCTAAAGCCTTACAAACATACAGCGAGACTGGTAGTGATCTTCTTTACCAAC |
| | CACCCAACTGTAGCATAACCTCTGGCGTGTTGCAAAGCGGTTTGGTGAAAATGTCACATCCCAGTGG |
| | AGATGTTGAGGCTTGTATGGTTCAGGTTACCTGCGGTAGCATGACTCTTAATGGTCTTTGGCTTGAC |
| | AACACAGTCTGGTGCCCACGACACGTAATGTGCCCGGCTGACCAGTTGTCTGATCCTAATTATGATG |
| | CCTTGTTGATTTCTATGACTAATCATAGTTTCAGTGTGCAAAAACACATTGGCGCTCCAGCAAACTT |
| | GCGTGTTGTTGGTCATGCCATGCAAGGCACTCTTTTGAAGTTGACTGTCGATGTTGCTAACCCTAGC |
| | ACTCCAGCCTACACTTTTACAACAGTGAAACCTGGCGCAGCATTTAGTGTGTTAGCATGCTATAATG |
| | GTCGTCCGACTGGTACATTCACTGTTGTAATGCGCCCTAACTACACAATTAAGGGTTCCTTTCTGTG |
| | TGGTTCTTGTGGTAGTGTTGGTTACACCAAGGAGGGTAGTGTGATCAATTTTTGTTACATGCATCAA |
| | ATGGAACTTGCTAATGGTACACATACCGGTTCAGCATTTGATGGTACTATGTATGGTGCCTTTATGG |
| | ATAAACAAGTGCACCAAGTTCAGTTAACAGACAAATACTGCAGTGTTAATGTAGTAGCTTGGCTTTA |
| | CGCAGCAATACTTAATGGTTGCGCTTGGTTTGTAAAACCTAATCGCACTAGTGTTGTTTCTTTTAAT |
| | GAATGGGCTCTTGCCAACCAATTCACTGAATTTGTTGGCACTCAATCCGTTGACATGTTAGCTGTCA |
| | AAACAGGCGTTGCTATTGAACAGCTGCTTTATGCGATCCAACAACTTTATACTGGGTTCCAGGGAAA |
| | GCAAATCCTTGGCAGTACCATGTTGGAAGATGAATTCACACCTGAGGATGTTAATATGCAGATTATG |
| | GGTGTGGTTATGCAGAGTGGTGTGAGAAAAGTTACATATGGTACTGCGCATTGGTTGTTCGCGACCC |
| | TTGTCTCAACCTATGTGATAATCTTACAAGCCACTAAATTTACTTTGTGGAACTACTTGTTTGAGAC |
| | TATTCCCACACAGTTGTTCCCACTCTTATTTGTGACTATGGCCTTCGTTATGTTGTTGGTTAAACAC |
| | AAACACACCTTTTTGACACTTTTCTTGTTGCCTGTGGCTATTTGTTTGACTTATGCAAACATAGTCT |
| | ACGAGCCCACTACTCCCATTTCGTCAGCGCTGATTGCAGTTGCAAATTGGCTTGCCCCCACTAATGC |
| | TTATATGCGCACTACACATACTGATATTGGTGTCTACATTAGTATGTCACTTGTATTAGTCATTGTA |
| | GTGAAGAGATTGTACAACCCATCACTTTCTAACTTTGCGTTAGCATTGTGCAGTGGTGTAATGTGGT |
| | TGTACACTTATAGCATTGGAGAAGCCTCAAGCCCCATTGCCTATCTGGTTTTTGTCACTACACTCAC |
| | TAGTGATTATACGATTACAGTCTTTGTTACTGTTAACCTTGCAAAAGTTTGCACTTATGCCATCTTT |
| | GCTTACTCGCCACAGCTTACACTTGTGTTTCCGGAAGTGAAGATGATACTTTTATTATACACATGTT |
| | TAGGTTTCATGTGTACTTGCTATTTTGGTGTCTTCTCTCTTTTGAACCTTAAGCTTAGAGCACCTAT |
| | GGGTGTCTATGACTTTAAGGTCTCAACACAAGAGTTCAGATTCATGACAGCTAACAATCTAACTGCA |
| | CCTAGAAATTCTTGGGAGGCTATGGCTCTGAACTTTAAGTTAATAGGTATTGGCGGTACACCTTGTA |
| | TAAAGGTTGCTGCTATGCAGTCTAAACTTACAGATCTTAAATGCACATCTGTGGTTCTCCTCTCTGT |
| | GCTCCAACAGTTACACTTAGAGGCTAATAGTAGGGCCTGGGCTTTCTGTGTTAAATGCCATAATGAT |
| | ATATTGGCAGCAACAGACCCCAGTGAGGCTTTCGAGAAATTCGTAAGTCTCTTTGCCACTTTAATGA |
| | CTTTTTCTGGTAATGTAGATCTTGATGCGTTAGCTAGTGATATTTTTGACACTCCTAGCGTACTTCA |
| | AGCTACTCTTTCTGAGTTTTCACACTTAGCTACCTTTGCTGAGTTGGAAGCTGCGCAGAAAGCCTAT |
| | CAGGAAGCTATGGACTCTGGTGACACCTCACCACAAGTTCTTAAGGCTTTGCAGAAGGCTGTTAATA |
| | TAGCTAAAAACGCCTATGAGAAGGATAAGGCAGTGGCCCGTAAGTTAGAACGTATGGCTGATCAGGC |
| | TATGACTTCTATGTATAAGCAAGCACGTGCTGAAGACAAGAAAGCAAAAATTGTCAGTGCTATGCAA |
| | ACTATGTTGTTTGGTATGATTAAGAAGCTCGACAACGATGTTCTTAATGGTATCATTTCTAACGCTA |
| | GGAATGGTTGTATACCTCTTAGTGTCATTCCACTGTGTGCTTCAAATAAACTTCGCGTTGTAATTCC |
| | TGACTTCACCGTCTGGAATCAGGTAGTCACATATCCCTCGCTTAACTACGCTGGGGCTTTGTGGGAC |
| | ATTACAGTTATAAACAATGTGGACAATGAAATTGTTAAGTCTTCAGATGTTGTAGACAGCAATGAAA |
| | ATTTAACATGGCCACTTGTTTTAGAATGCACTAGGGCATCCACTTCTGCCGTTAAGTTGCAAAATAA |
| | TGAGATCAAACCTTCAGGTTTAAAAACCATGGTTGTGTCTGCAGGTCAAGAGCAAACTAACTGTAAT |
| | ACTAGTTCCTTAGCTTATTACGAACCTGTGCAGGGTCGTAAAATGCTGATGGCTCTTCTTTCTGATA |
| | ATGCCTATCTCAAATGGGCGCGTGTTGAAGGTAAGGACGGATTTGTTAGTGTAGAGCTACAACCTCC |
| | TTGCAAATTCTTGATTGCGGGACCAAAAGGACCTGAAATCCGATATCTCTATTTTGTTAAAAATCTT |
| | AACAACCTTCATCGCGGGCAAGTGTTAGGGCACATTGCTGCGACTGTTAGATTGCAAGCTGGTTCTA |
| | ACACCGAGTTTGCCTCTAATTCTTCGGTGTTGTCACTTGTTAACTTCACCGTTGATCCTCAAAAAGC |
| | TTATCTCGATTTCGTCAATGCGGGAGGTGCCCCATTGACAAATTGTGTTAAGATGCTTACTCCTAAA |
| | ACTGGTACAGGTATAGCTATATCTGTTAAACCAGAGAGTACAGCTGATCAAGAGACTTATGGTGGAG |
| | CTTCAGTGTGTCTCTATTGCCGTGCGCATATAGAACATCCTGATGTCTCTGGTGTTTGTAAATATAA |
| | GGGTAAGTTTGTCCAAATCCCTGCTCAGTGTGTCCGTGACCCTGTGGGATTTTGTTTGTCAAATACC |
| | CCCTGTAATGTCTGTCAATATTGGATTGGATATGGGTGCAATTGTGACTCGCTTAGGCAAGCAGCAC |
| | TGCCCCAATCTAAAGATTCCAATTTTTTAAACGAGTCCGGGGTTCTATTGTAAATGCCCGAATAGAA |
| | CCCTGTTCAAGTGGTTTGTCCACTGATGTCGTCTTTAGGGCATTTGACATCTGCAACTATAAGGCTA |
| | AGGTTGCTGGTATTGGAAAATACTACAAGACTAATACTTGTAGGTTTGTAGAATTAGATGACCAAGG |
| | GCATCATTTAGACTCCTATTTTGTCGTTAAGAGGCATACTATGGAGAATTATGAACTAGAGAAGCAC |
| | TGTTACGATTTGTTACGTGACTGTGATGCTGTAGCTCCCCATGATTTCTTCATCTTTGATGTAGACA |
| | AAGTTAAAACACCTCATATTGTACGTCAGCGTTTAACTGAGTACACTATGATGGATCTTGTATATGC |
| | CCTGAGGCACTTTGATCAAAATAGCGAAGTGCTTAAGGCTATCTTAGTGAAGTATGGTTGCTGTGAT |
| | GTTACCTACTTTGAAAATAAACTCTGGTTTGATTTTGTTGAAAATCCCAGTGTTATTGGTGTTTATC |
| | ATAAACTTGGAGAACGTGTACGCCAAGCTATCTTAAACACTGTTAAATTTTGTGACCACATGGTCAA |
| | GGCTGGTTTAGTCGGTGTGCTCACACTAGACAACCAGGACCTTAATGGCAAGTGGTATGATTTTGGT |
| | GACTTCGTAATCACTCAACCTGGTTCAGGAGTAGCTATAGTTGATAGCTACTATTCTTATTTGATGC |
| | CTGTGCTCTCAATGACCGATTGTCTGGCCGCTGAGACACATAGGGATTGTGATTTTAATAAACCACT |
| | CATTGAGTGGCCACTTACTGAGTATGATTTTACTGATTATAAGGTACAACTCTTTGAGAAGTACTTT |
| | AAATATTGGGATCAGACGTATCACGCAAATTGCGTTAATTGTACTGATGACCGTTGTGTGTTACATT |
| | GTGCTAATTTCAATGTATTGTTTGCTATGACCATGCCTAAGACTTGTTTCGGACCCATAGTCCGAAA |
| | GATCTTTGTTGATGGCGTGCCATTTGTAGTATCTTGTGGTTATCACTACAAAGAATTAGGTTTAGTC |
| | ATGAATATGGATGTTAGTCTCCATAGACATAGGCTCTCTCTTAAGGAGTTGATGATGTATGCCGCTG |
| | ATCCAGCCATGCACATTGCCTCCTCTAACGCTTTTCTTGATTTGAGGACATCATGTTTTAGTGTCGC |
| | TGCACTTACAACTGGTTTGACTTTTCAAACTGTGCGGCCTGGCAATTTTAACCAAGACTTCTATGAT |
| | TTCGTGGTATCTAAAGGTTTCTTTAAGGAGGGCTCTTCAGTGACGCTCAAACATTTTTTCTTTGCTC |
| | AAGATGGTAATGCTGCTATTACAGATTATAATTACTATTCTTATAATCTGCCTACTATGTGTGACAT |
| | CAAACAAATGTTGTTCTGCATGGAAGTTGTAAACAAGTACTTCGAAATCTATGACGGTGGTTGTCTT |
| | AATGCTTCTGAAGTGGTTGTTAATAATTTAGACAAGAGTGCTGGCCATCCTTTTAATAAGTTTGGCA |
| | AAGCTCGTGTCTATTATGAGAGCATGTCTTACCAGGAGCAAGATGAACTCTTTGCCATGACAAAGCG |
| | TAACGTCATTCCTACCATGACTCAAATGAATCTAAAATATGCTATTAGTGCTAAGAATAGAGCTCGC |
| | ACTGTTGCAGGCGTGTCCATACTTAGCACAATGACTAATCGCCAGTACCATCAGAAAATGCTTAAGT |
| | CCATGGCTGCAACTCGTGGAGCGACTTGCGTCATTGGTACTACAAAGTTCTATGGTGGCTGGGATTT |
| | CATGCTTAAAACATTGTACAAAGATGTTGATAATCCGCATCTTATGGGTTGGGATTACCCTAAGTGT |
| | GATAGAGCTATGCCTAATATGTGTAGAATCTTCGCTTCACTCATATTAGCTCGTAAACATGGCACTT |
| | GTTGTACTACAAGGGACAGATTTTATCGCTTGGCAAATGAGTGTGCTCAGGTGCTAAGCGAATATGT |
| | TCTATGTGGTGGTGGTTACTACGTCAAACCTGGAGGTACCAGTAGCGGAGATGCCACCACTGCATAT |
| | GCCAATAGTGTCTTTAACATTTTGCAGGCGACAACTGCTAATGTCAGTGCACTTATGGGTGCTAATG |
| | GCAACAAGATTGTTGACAAAGAAGTTAAAGACATGCAGTTTGATTTGTATGTCAATGTTTACAGGAG |
| | CACTAGCCCAGACCCCAAATTTGTTGATAAATACTATGCTTTTCTTAATAAGCACTTTTCTATGATG |
| | ATACTGTCTGATGACGGTGTCGTTTGCTATAATAGTGATTATGCAGCTAAGGGTTACATTGCTGGAA |
| | TACAGAATTTCAAGGAAACGCTGTATTATCAGAACAATGTCTTTATGTCTGAAGCTAAATGCTGGGT |
| | GGAAACCGATCTGAAGAAAGGGCCACATGAATTCTGTTCACAGCATACGCTTTATATTAAGGATGGC |
| | GACGATGGTTACTTCCTTCCTTATCCAGACCCTTCAAGAATTTTGTCTGCCGGTTGCTTTGTAGATG |
| | ATATCGTTAAGACTGACGGTACACTCATGGTAGAGCGGTTTGTGTCTTTGGCTATAGATGCTTACCC |
| | TCTCACAAAGCATGAAGATATAGAATACCAGAATGTATTCTGGGTCTACTTACAGTATATAGAAAAA |
| | CTGTATAAAGACCTTACAGGACACATGCTTGACAGTTATTCTGTCATGCTATGTGGTGATAATTCTG |
| | CTAAGTTTTGGGAAGAGGCATTCTATAGAGATCTCTATAGTTCGCCTACCACTTTGCAGGCTGTCGG |
| | TTCATGCGTTGTATGCCATTCACAGACTTCCCTACGCTGTGGGACATGCATCCGTAGACCATTTCTC |
| | TGCTGTAAATGCTGCTATGATCATGTTATAGCAACTCCACATAAGATGGTTTTGTCTGTTTCTCCTT |
| | ACGTTTGTAATGCCCCTGGTTGTGGCGTTTCAGACGTTACTAAGCTATATTTAGGTGGTATGAGCTA |
| | CTTTTGTGTAGATCATAGACCTGTGTGTAGTTTTCCACTTTGCGCTAATGGTCTTGTATTCGGCTTA |
| | TACAAGAATATGTGCACAGGTAGTCCTTCTATAGTTGAATTTAATAGGTTGGCTACCTGTGACTGGA |
| | CTGAAAGTGGTGATTACACCCTTGCCAATACTACAACAGAACCACTCAAACTTTTTGCTGCTGAGAC |
| | TTTACGTGCCACTGAAGAGGCGTCTAAGCAGTCTTATGCTATTGCCACCATCAAAGAAATTGTTGGT |
| | GAGCGCCAACTATTACTTGTGTGGGAGGCTGGCAAGTCCAAACCACCACTCAATCGTAATTATGTTT |
| | TTACTGGTTATCATATAACCAAAAATAGTAAAGTGCAGCTCGGTGAGTACATCTTCGAGCGCATTGA |
| | TTATAGTGATGCTGTATCCTACAAGTCTAGTACAACGTATAAACTGACTGTAGGTGACATCTTCGTA |
| | CTTACCTCTCACTCTGTGGCTACCTTGACGGCGCCCACAATTGTGAATCAAGAGAGGTATGTTAAAA |
| | TTACTGGGTTGTACCCAACCATTACGGTACCTGAAGAGTTCGCAAGTCATGTTGCCAACTTCCAAAA |
| | ATCAGGTTATAGTAAATATGTCACTGTTCAGGGACCACCTGGCACTGGCAAAAGTCATTTTGCTATA |
| | GGGTTAGCGATTTACTACCCTACAGCACGTGTTGTTTATACAGCATGTTCACACGCAGCTGTTGATG |
| | CTTTGTGTGAAAAAGCTTTTAAATATTTGAACATTGCTAAATGTTCCCGTATCATTCCTGCAAAGGC |
| | ACGTGTTGAGTGCTATGACAGGTTTAAAGTTAATGAGACAAATTCTCAATATTTGTTTAGTACTATT |
| | AATGCTCTACCAGAAACTTCTGCCGATATTCTGGTGGTTGATGAGGTTAGTATGTGCACTAATTATG |
| | ATCTTTCAATTATTAATGCACGTATTAAAGCTAAGCACATTGTCTATGTAGGAGATCCAGCACAGTT |
| | GCCAGCTCCTAGGACTTTGTTGACTAGAGGCACATTGGAACCAGAAAATTTCAATAGTGTCACTAGA |
| | TTGATGTGTAACTTAGGTCCTGACATATTTTTAAGTATGTGCTACAGGTGTCCTAAGGAAATAGTAA |
| | GCACTGTGAGCGCTCTTGTCTACAATAATAAATTGTTAGCCAAGAAGGAGCTTTCAGGCCAGTGCTT |
| | TAAAATACTCTATAAGGGCAATGTGACGCATGATGCTAGCTCTGCCATTAATAGACCACAACTCACA |
| | TTTGTGAAGAATTTTATTACTGCCAATCCGGCATGGAGTAAGGCAGTCTTTATTTCGCCTTATAATT |
| | CACAGAATGCTGTGGCTCGTTCAATGCTGGGTCTTACTACTCAGACTGTTGATTCCTCACAGGGTTC |
| | AGAATACCAGTACGTTATCTTCTGTCAAACAGCAGATACGGCACATGCTAACAACATTAACAGATTT |
| | AATGTTGCAATCACTCGTGCCCAAAAAGGTATTCTTTGTGTTATGACATCTCAGGCACTCTTTGAGT |
| | CCTTAGAGTTTACTGAATTGTCTTTTACTAATTACAAGCTCCAGTCTCAGATTGTAACTGGCCTTTT |
| | TAAAGATTGCTCTAGAGAAACTTCTGGCCTCTCACCTGCTTATGCACCAACATACGTTAGTGTTGAT |
| | GACAAGTATAAGACGAGTGATGAGCTTTGCGTGAATCTTAATTTACCCGCAAATGTCCCATACTCTC |
| | GTGTTATTTCCAGGATGGGCTTTAAACTCGATGCAACAGTTCCTGGATATCCTAAGCTTTTCATTAC |
| | TCGTGAAGAGGCTGTAAGGCAAGTTCGAAGCTGGATAGGCTTCGATGTTGAGGGTGCTCATGCTTCC |
| | CGTAATGCATGTGGCACCAATGTGCCTCTACAATTAGGATTTTCAACTGGTGTGAACTTTGTTGTTC |
| | AGCCAGTTGGTGTTGTAGACACTGAGTGGGGTAACATGTTAACGGGCATTGCTGCCCGTCCTCCACC |
| | AGGTGAACAGTTTAAGCACCTCGTGCCTCTTATGCATAAGGGGGCTGCGTGGCCTATTGTTAGACGA |
| | CGTATAGTGCAAATGTTGTCAGACACTTTAGACAAATTGTCTGATTACTGTACGTTTGTTTGTTGGG |
| | CTCATGGCTTTGAATTAACGTCTGCATCATACTTTTGCAAGATAGGTAAGGAACAGAAGTGTTGCAT |
| | GTGCAATAGACGCGCTGCAGCGTACTCTTCACCTCTGCAATCTTATGCCTGCTGGACTCATTCCTGC |
| | GGTTATGATTATGTCTACAACCCTTTCTTTGTCGATGTTCAACAGTGGGGTTATGTAGGCAATCTTG |
| | CTACTAATCACGATCGTTATTGCTCTGTCCATCAAGGAGCTCATGTGGCTTCTAATGATGCAATAAT |
| | GACTCGTTGTTTAGCTATTCATTCTTGTTTTATAGAACGTGTGGATTGGGATATAGAGTATCCTTAT |
| | ATCTCACATGAAAAGAAATTGAATTCCTGTTGTAGAATCGTTGAGCGCAACGTCGTACGTGCTGCTC |
| | TTCTTGCCGGTTCATTTGACAAAGTCTATGATATTGGCAATCCTAAAGGAATTCCTATTGTTGATGA |
| | CCCTGTGGTTGATTGGCATTATTTTGATGCACAGCCCTTGACCAGAAAGGTACAACAGCTTTTCTAT |
| | ACAGAGGACATGGCCTCAAGATTTGCTGATGGGCTCTGCTTATTTTGGAACTGTAATGTACCAAAAT |
| | ATCCTAATAATGCAATTGTATGCAGGTTTGACACACGTGTGCATTCTGAGTTCAATTTGCCAGGTTG |
| | TGATGGCGGTAGTTTGTATGTTAACAAGCACGCTTTTCATACACCAGCATATGATGTGAGTGCATTC |
| | CGTGATCTGAAACCTTTACCATTCTTTTATTATTCTACTACACCATGTGAAGTGCATGGTAATGGTA |
| | GTATGATAGAGGATATTGATTATGTACCCCTAAAATCTGCAGTCTGTATTACAGCTTGTAATTTAGG |
| | GGGCGCTGTTTGTAGGAAGCATGCTACAGAGTACAGAGAGTATATGGAAGCATATAATCTTGTCTCT |
| | GCATCAGGTTTCCGCCTTTGGTGTTATAAGACCTTTGATATTTATAATCTCTGGTCTACTTTTACAA |
| | AAGTTCAAGGTTTGGAAAACATTGCTTTTAATTTTGTTAAACAAGGCCATTTTATTGGTGTTGAGGG |
| | TGAACTACCTGTAGCTGTAGTCAATGATAAGATCTTCACCAAGAGTGGCGTTAATGACATTTGTATG |
| | TTTGAGAATAAAACCACTTTGCCTACTAATATAGCTTTTGAACTCTATGCTAAGCGTGCTGTACGCT |
| | CGCATCCCGATTTCAAATTGCTACACAATTTACAAGCAGACATTTGCTACAAGTTCGTCCTTTGGGA |
| | TTATGAACGTAGCAATATTTATGGTACTGCTACTATTGGTGTATGTAAGTACACTGATATTGATGTT |
| | AATTCAGCTTTGAATATATGTTTTGACATACGCGATAATGGTTCATTGGAGAAGTTCATGTCTACTC |
| | CCAATGCCATCTTTATTTCTGATAGAAAAATCAAGAAATACCCTTGTATGGTAGGTCCTGATTATGC |
| | TTACTTCAATGGTGCTATCATCCGTGATAGTGATGTTGTTAAACAACCAGTGAAGTTCTACTTGTAT |
| | AAGAAAGTCAATAATGAGTTTATTGATCCTACTGAGTGTATTTACACTCAGAGTCGCTCTTGTAGTG |
| | ACTTCCTACCCCTGTCTGACATGGAGAAAGACTTTCTATCTTTTGATAGTGATGTTTTCATTAAGAA |
| | GTATGGCTTGGAAAACTATGCTTTTGAGCACGTAGTCTATGGAGACTTCTCTCATACTACGTTAGGC |
| | GGTCTTCACTTGCTTATTGGTTTATACAAGAAGCAACAGGAAGGTCATATTATTATGGAAGAAATGC |
| | TAAAAGGTAGCTCAACTATTCATAACTATTTTATTACTGAGACTAACACAGCGGCTTTTAAGGCGGT |
| | GTGTTCTGTTATAGATTTAAAGCTTGACGACTTTGTTATGATTTTAAAGAGTCAAGACCTTGGCGTA |
| | GTATCCAAGGTTGTCAAGGTTCCTATTGACTTAACAATGATTGAGTTTATGTTATGGTGTAAGGATG |
| | GACAGGTTCAAACCTTCTACCCTCGACTCCAGGCTTCTGCAGATTGGAAACCTGGTCATGCAATGCC |
| | ATCCCTCTTTAAAGTTCAAAATGTAAACCTTGAACGTTGTGAGCTTGCTAATTACAAGCAATCTATT |
| | CCTATGCCTCGCGGTGTGCACATGAACATCGCTAAATATATGCAATTGTGCCAGTATTTAAATACTT |
| | GCACATTAGCCGTGCCTGCCAATATGCGTGTTATACATTTTGGCGCTGGTTCTGATAAAGGTATCGC |
| | TCCTGGTACATCAGTTTTACGACAGTGGCTTCCTACAGATGCCATTATTATAGATAATGATTTAAAT |
| | GAGTTCGTGTCAGATGCTGACATAACTTTATTTGGAGATTGTGTAACTGTACGTGTCGGCCAACAAG |
| | TGGATCTTGTTATTTCCGACATGTATGATCCTACTACTAAGAATGTAACAGGTAGTAATGAGTCAAA |
| | GGCTTTATTCTTTACTTACCTGTGTAACCTCATTAATAATAATCTTGCTCTTGGTGGGTCTGTTGCT |
| | ATTAAAATAACAGAACACTCTTGGAGCGTTGAACTTTATGAACTTATGGGAAAATTTGCTTGGTGGA |
| | CTGTTTTCTGCACCAATGCAAATGCATCCTCATCTGAAGGATTCCTCTTAGGTATTAATTACTTGGG |
| | TACTATTAAAGAAAATATAGATGGTGGTGCTATGCACGCCAACTATATATTTTGGAGAAATTCCACT |
| | CCTATGAATCTGAGTACTTACTCACTTTTTGATTTATCCAAGTTTCAATTAAAATTAAAAGGAACAC |
| | CAGTTCTTCAATTAAAGGAGAGTCAAATTAACGAACTCGTAATATCTCTCCTGTCGCAGGGTAAGTT |
| | ACTTATCCGTGACAATGATACACTCAGTGTTTCTACTGATGTTCTTGTTAACACCTACAGAAAGTTA |
| | CGTTGATGTAGGGCCAGATTCTGTTAAGTCTGCTTGTATTGAGGTTGATATACAACAGACTTTCTTT |
| | GATAAAACTTGGCCTAGGCCAATTGATGTTTCTAAGGCTGACGGTATTATATACCCTCAAGGCCGTA |
| | CATATTCTAACATAACTATCACTTATCAAGGTCTTTTTCCCTATCAGGGAGACCATGGTGATATGTA |
| | TGTTTACTCTGCAGGACATGCTACAGGCACAACTCCACAAAAGTTGTTTGTAGCTAACTATTCTCAG |
| | GACGTCAAACAGTTTGCTAATGGGTTTGTCGTCCGTATAGGAGCAGCTGCCAATTCCACTGGCACTG |
| | TTATTATTAGCCCATCTACCAGCGCTACTATACGAAAAATTTACCCTGCTTTTATGCTGGGTTCTTC |
| | AGTTGGTAATTTCTCAGATGGTAAAATGGGCCGCTTCTTCAATCATACTCTAGTTCTTTTGCCCGAT |
| | GGATGTGGCACTTTACTTAGAGCTTTTTATTGTATTCTAGAGCCTCGCTCTGGAAATCATTGTCCTG |
| | CTGGCAATTCCTATACTTCTTTTGCCACTTATCACACTCCTGCAACAGATTGTTCTGATGGCAATTA |
| | CAATCGTAATGCCAGTCTGAACTCTTTTAAGGAGTATTTTAATTTACGTAACTGCACCTTTATGTAC |
| | ACTTATAACATTACCGAAGATGAGATTTTAGAGTGGTTTGGCATTACACAAACTGCTCAAGGTGTTC |
| | ACCTCTTCTCATCTCGGTATGTTGATTTGTACGGCGGCAATATGTTTCAATTTGCCACCTTGCCTGT |
| | TTATGATACTATTAAGTATTATTCTATCATTCCTCACAGTATTCGTTCTATCCAAAGTGATAGAAAA |
| | GCTTGGGCTGCCTTCTACGTATATAAACTTCAACCGTTAACTTTCCTGTTGGATTTTTCTGTTGATG |
| | GTTATATACGCAGAGCTATAGACTGTGGTTTTAATGATTTGTCACAACTCCACTGCTCATATGAATC |
| | CTTCGATGTTGAATCTGGAGTTTATTCAGTTTCGTCTTTCGAAGCAAAACCTTCTGGCTCAGTTGTG |
| | GAACAGGCTGAAGGTGTTGAATGTGATTTTTCACCTCTTCTGTCTGGCACACCTCCTCAGGTTTATA |
| | ATTTCAAGCGTTTGGTTTTTACCAATTGCAATTATAATCTTACCAAATTGCTTTCACTTTTTTCTGT |
| | GAATGATTTTACTTGTAGTCAAATATCTCCAGCAGCAATTGCTAGTAACTGTTATTCTTCACTGATT |
| | TTGGATTATTTTTCATACCCACTTAGTATGAAATCCGATCTCAGTGTTAGTTCTGCTGGTCCAATAT |
| | CCCAGTTTAATTATAAACAGTCCTTTTCTAATCCCACATGTTTGATTTTAGCGACTGTTCCTCATAA |
| | CCTTACTACTATTACTAAGCCTCTTAAGTACAGCTATATTAACAAGTGCTCTCGTTTTCTTTCTGAT |
| | GATCGTACTGAAGTACCTCAGTTAGTGAACGCTAATCAATACTCACCCTGTGTATCCATTGTCCCAT |
| | CCACTGTGTGGGAAGACGGTGATTATTATAGGAAACAACTATCTCCACTTGAAGGTGGTGGCTGGCT |
| | TGTTGCTAGTGGCTCAACTGTTGCCATGACTGAGCAATTACAGATGGGCTTTGGTATTACAGTTCAA |
| | TATGGTACAGACACCAATAGTGTTTGCCCCAAGCTTGAATTTGCTAATGACACAAAAATTGCCTCTC |
| | AATTAGGCAATTGCGTGGAATATTCCCTCTATGGTGTTTCGGGCCGTGGTGTTTTTCAGAATTGCAC |
| | AGCTGTAGGTGTTCGACAGCAGCGCTTTGTTTATGATGCGTACCAGAATTTAGTTGGCTATTATTCT |
| | GATGATGGCAACTACTACTGTTTGCGTGCTTGTGTTAGTGTTCCTGTTTCTGTCATCTATGATAAAG |
| | AAACTAAAACCCACGCTACTCTATTTGGTAGTGTTGCATGTGAACACATTTCCTCTACCATGTCTCA |
| | ATACTCCCGTTCTACGCGATCAATGCTTAAACGGCGAGATTCTACATATGGCCCCCTTCAGACACCT |
| | GTTGGTTGTGTCCTAGGACTTGTTAATTCCTCTTTGTTCGTAGAGGACTGCAAGTTGCCTCTTGGTC |
| | AATCTCTCTGTGCTCTTCCTGACACACCTAGTACTCTCACACCTCGCAGTGTGCGCTCTGTTCCAGG |
| | TGAAATGCGCTTGGCATCCATTGCTTTTAATCATCCTATTCAGGTTGATCAACTTAATAGTAGTTAT |
| | TTTAAATTAAGTATACCCACTAATTTTTCCTTTGGTGTGACTCAGGAGTACATTCAGACAACCATTC |
| | AGAAAGTTACTGTTGATTGTAAACAGTACGTTTGCAATGGTTTCCAGAAGTGTGAGCAATTACTGCG |
| | CGAGTATGGCCAGTTTTGTTCCAAAATAAACCAGGCTCTCCATGGTGCCAATTTACGCCAGGATGAT |
| | TCTGTACGTAATTTGTTTGCGAGCGTGAAAAGCTCTCAATCATCTCCTATCATACCAGGTTTTGGAG |
| | GTGACTTTAATTTGACACTTCTAGAACCTGTTTCTATATCTACTGGCAGTCGTAGTGCACGTAGTGC |
| | TATTGAGGATTTGCTATTTGACAAAGTCACTATAGCTGATCCTGGTTATATGCAAGGTTACGATGAT |
| | TGCATGCAGCAAGGTCCAGCATCAGCTCGTGATCTTATTTGTGCTCAATATGTGGCTGGTTACAAAG |
| | TATTACCTCCTCTTATGGATGTTAATATGGAAGCCGCGTATACCTCATCTTTGCTTGGCAGCATAGC |
| | AGGTGTTGGCTGGACTGCTGGCTTATCCTCCTTTGCTGCTATTCCATTTGCACAGAGTATCTTTTAT |
| | AGGTTAAACGGTGTTGGCATTACTCAACAGGTTCTTTCAGAGAACCAAAAGCTTATTGCCAATAAGT |
| | TTAATCAGGCTCTGGGAGCTATGCAAACAGGCTTCACTACAACTAATGAAGCTTTTCACAAGGTTCA |
| | GGATGCTGTGAACAACAATGCACAGGCTCTATCCAAATTAGCTAGCGAGCTATCTAATACTTTTGGT |
| | GCTATTTCCGCCTCTATTGGAGACATCATACAACGTCTTGATGTTCTCGAACAGGACGCCCAAATAG |
| | ACAGACTTATTAATGGCCGTTTGACAACACTAAATGCTTTTGTTGCACAGCAGCTTGTTCGTTCCGA |
| | ATCAGCTGCTCTTTCGGCTCAATTGGCTAAAGATAAAGTCAATGAGTGTGTCAAGGCACAATCCAAG |
| | CGTTCTGGATTTTGCGGTCAAGGCACACATATAGTGTCCTTTGTTGTAAATGCCCCTAATGGCCTTT |
| | ACTTCATGCATGTTGGTTATTACCCTAGCAACCACATTGAGGTTGTTTCTGCTTATGGTCTTTGCGA |
| | TGCAGCTAACCCTACTAATTGTATAGCCCCTGTTAATGGCTACTTTATTAAAACTAATAACACTAGG |
| | ATTGTTGATGAGTGGTCATATACTGGCTCGTCCTTCTATGCACCTGAGCCCATCACCTCTCTTAATA |
| | CTAAGTATGTTGCACCACAGGTGACATACCAAAACATTTCTACTAACCTCCCTCCTCCTCTTCTCGG |
| | CAATTCCACCGGGATTGACTTCCAAGATGAGTTGGATGAGTTTTTCAAAAATGTTAGCACCAGTATA |
| | CCTAATTTTGGTTCTCTAACACAGATTAATACTACATTACTCGATCTTACCTACGAGATGTTGTCTC |
| | TTCAACAAGTTGTTAAAGCCCTTAATGAGTCTTACATAGACCTTAAAGAGCTTGGCAATTATACTTA |
| | TTACAACAAATGGCCGTGGTACATTTGGCTTGGTTTCATTGCTGGGCTTGTTGCCTTAGCTCTATGC |
| | GTCTTCTTCATACTGTGCTGCACTGGTTGTGGCACAAACTGTATGGGAAAACTTAAGTGTAATCGTT |
| | GTTGTGATAGATACGAGGAATACGACCTCGAGCCGCATAAGGTTCATGTTCACTAATTAACGAACTA |
| | TCAATGAGAGTTCAAAGACCACCCACTCTCTTGTTAGTGTTCTCACTCTCTCTTTTGGTCACTGCAT |
| | TTTCAAAACCTCTCTATGTACCTGAGCATTGTCAGAATTATTCTGGTTGCATGCTTAGGGCTTGTAT |
| | TAAAACTGCCCAAGCTGATACAGCTGGTCTTTATACAAATTTTCGAATTGACGTCCCATCTGCAGAA |
| | TCAACTGGTACTCAATCAGTTTCTGTCGATCGTGAGTCAACTTCAACTCATGATGGTCCTACCGAAC |
| | ATGTTACTAGTGTGAATCTTTTTGACGTTGGTTACTCAGTTAATTAACGAACTCTATGGATTACGTG |
| | TCTCTGCTTAATCAAATTTGGCAGAAGTACCTTAATTCACCGTATACTACTTGTTTGTATATCCCTA |
| | AACCCACAGCTAAGTATACACCTTTAGTTGGCACTTCATTGCACCCTGTGCTGTGGAACTGTCAGCT |
| | ATCCTTTGCTGGTTATACTGAATCTGCTGTTAATTCTACAAAAGCTTTGGCCAAACAGGACGCAGCT |
| | CAGCGAATCGCTTGGTTGCTACATAAGGATGGAGGAATCCCTGATGGATGTTCCCTCTACCTCCGGC |
| | ACTCAAGTTTATTCGCGCAAAGCGAGGAAGAGGAGTCATTCTCCAACTAAGAAACTGCGCTACGTTA |
| | AGCGTAGATTTTCTCTTCTGCGCCCTGAAGACCTTAGTGTTATTGTCCAACCAACACACTATGTCAG |
| | GGTTACATTTTCAGACCCCAACATGTGGTATCTACGTTCGGGTCATCATTTACACTCAGTTCACAAT |
| | TGGCTTAAACCTTATGGCGGCCAACCTGTTTCTGAGTACCATATTACTCTAGCTTTGCTAAATCTCA |
| | CTGATGAAGATTTAGCTAGAGATTTTTCACCCATTGCGCTCTTTTTGCGCAATGTCAGATTTGAGCT |
| | ACATGAGTTCGCCTTGCTGCGCAAAACTCTTGTTCTTAATGCATCAGAGATCTACTGTGCTAACATA |
| | CATAGATTTAAGCCTGTGTATAGAGTTAACACGGCAATCCCTACTATTAAGGATTGGCTTCTCGTTC |
| | AGGGATTTTCCCTTTACCATAGTGGCCTCCCTTTACATATGTCAATCTCTAAATTGCATGCACTGGA |
| | TGATGTTACTCGCAATTACATCATTACAATGCCATGCTTTAGAACTTATCCTCAACAAATGTTTGTT |
| | ACTCCTTTGGCCGTAGATGTTGTCTCCATACGGTCTTCCAATCAGGGTAATAAACAAATTGTTCATT |
| | CTTACCCCATTTTACATCATCCAGGATTTTAACGAACTATGGCTTTCTCGGCGTCTTTATTTAAACC |
| | CGTCCAGCTAGTCCCAGTTTCTCCTGCATTTCATCGCATTGAGTCTACTGACTCTATTGTTTTCACA |
| | TACATTCCTGCTAGCGGCTATGTAGCTGCTTTAGCTGTCAATGTGTGTCTCATTCCCCTATTATTAC |
| | TGCTACGTCAAGATACTTGTCGTCGCAGCATTATCAGAACTATGGTTCTCTATTTCCTTGTTCTGTA |
| | TAACTTTTTATTAGCCATTGTACTAGTCAATGGTGTACATTATCCAACTGGAAGTTGCCTGATAGCC |
| | TTCTTAGTTATCCTCATAATACTTTGGTTTGTAGATAGAATTCGTTTCTGTCTCATGCTGAATTCCT |
| | ACATTCCACTGTTTGACATGCGTTCTCACTTTATTCGTGTTAGTACAGTTTCTTCTCATGGTATGGT |
| | CCCTGTCATACACACCAAACCATTATTTATTAGAAACTTCGATCAGCGTTGCAGCTGTTCTCGTTGT |
| | TTTTATTTGCACTCTTCCACTTATATAGAGTGCACTTATATTAGCCGTTTTAGTAAGATTAGCCTAG |
| | TTTCTGTAACTGACTTCTCCTTAAACGGCAATGTTTCCACTGTTTTCGTGCCTGCAACGCGCGATTC |
| | AGTTCCTCTTCACATAATCGCCCCGAGCTCGCTTATCGTTTAAGCAGCTCTGCGCTACTATGGGTCC |
| | CGTGTAGAGGCTAATCCATTAGTCTCTCTTTGGACATATGGAAAACGAACTATGTTACCCTTTGTCC |
| | AAGAACGAATAGGGTTGTTCATAGTAAACTTTTTCATTTTTACCGTAGTATGTGCTATAACACTCTT |
| | GGTGTGTATGGCTTTCCTTACGGCTACTAGATTATGTGTGCAATGTATGACAGGCTTCAATACCCTG |
| | TTAGTTCAGCCCGCATTATACTTGTATAATACTGGACGTTCAGTCTATGTAAAATTCCAGGATAGTA |
| | AACCCCCTCTACCACCTGACGAGTGGGTTTAACGAACTCCTTCATAATGTCTAATATGACGCAACTC |
| | ACTGAGGCGCAGATTATTGCCATTATTAAAGACTGGAACTTTGCATGGTCCCTGATCTTTCTCTTAA |
| | TTACTATCGTACTACAGTATGGATACCCATCCCGTAGTATGACTGTCTATGTCTTTAAAATGTTTGT |
| | TTTATGGCTCCTATGGCCATCTTCCATGGCGCTATCAATATTTAGCGCCGTTTATCCAATTGATCTA |
| | GCTTCCCAGATAATCTCTGGCATTGTAGCAGCTGTTTCAGCTATGATGTGGATTTCCTACTTTGTGC |
| | AGAGTATCCGGCTGTTTATGAGAACTGGATCATGGTGGTCATTCAATCCTGAGACTAATTGCCTTTT |
| | GAACGTTCCATTTGGTGGTACAACTGTCGTACGTCCACTCGTAGAGGACTCTACCAGTGTAACTGCT |
| | GTTGTAACCAATGGCCACCTCAAAATGGCTGGCATGCATTTCGGTGCTTGTGACTACGACAGACTTC |
| | CTAATGAAGTCACCGTGGCCAAACCCAATGTGCTGATTGCTTTAAAAATGGTGAAGCGGCAAAGCTA |
| | CGGAACTAATTCCGGCGTTGCCATTTACCATAGATATAAGGCAGGTAATTACAGGAGTCCGCCTATT |
| | ACGGCGGATATTGAACTTGCATTGCTTCGAGCTTAGGCTCTTTAGTAAGAGTATCTTAATTGATTTT |
| | AACGAATCTCAATTTCATTGTTATGGCATCCCCTGCTGCACCTCGTGCTGTTTCCTTTGCCGATAAC |
| | AATGATATAACAAATACAAACCTGTCTCGAGGTAGAGGACGTAATCCAAAACCACGAGCTGCACCAA |
| | ATAACACTGTCTCTTGGTACACTGGGCTTACCCAACACGGGAAAGTCCCTCTTACCTTTCCACCTGG |
| | GCAGGGTGTACCTCTTAATGCCAATTCCACCCCTGCGCAAAATGCTGGGTATTGGCGGAGACAGGAC |
| | AGAAAAATTAATACCGGGAATGGAATTAAGCAACTGGCTCCCAGGTGGTACTTCTACTACACTGGAA |
| | CTGGACCCGAAGCAGCACTCCCATTCCGGGCTGTTAAGGATGGCATCGTTTGGGTCCATGAAGATGG |
| | CGCCACTGATGCTCCTTCAACTTTTGGGACGCGGAACCCTAACAATGATTCAGCTATTGTTACACAA |
| | TTCGCGCCCGGTACTAAGCTTCCTAAAAACTTCCACATTGAGGGGACTGGAGGCAATAGTCAATCAT |
| | CTTCAAGAGCCTCTAGCGTAAGCAGAAACTCTTCCAGATCTAGTTCACAAGGTTCAAGATCAGGAAA |
| | CTCTACCCGCGGCACTTCTCCAGGTCCATCTGGAATCGGAGCAGTAGGAGGTGATCTACTTTACCTT |
| | GATCTTCTGAACAGACTACAAGCCCTTGAGTCTGGCAAAGTAAAGCAATCGCAGCCAAAAGTAATCA |
| | CTAAGAAAGATGCTGCTGCTGCTAAAAATAAGATGCGCCACAAGCGCACTTCCACCAAAAGTTTCAA |
| | CATGGTGCAAGCTTTTGGTCTTCGCGGACCAGGAGACCTCCAGGGAAACTTTGGTGATCTTCAATTG |
| | AATAAACTCGGCACTGAGGACCCACGTTGGCCCCAAATTGCTGAGCTTGCTCCTACAGCCAGTGCTT |
| | TTATGGGTATGTCGCAATTTAAACTTACCCATCAGAACAATGATGATCATGGCAACCCTGTGTACTT |
| | CCTTCGGTACAGTGGAGCCATTAAACTTGACCCAAAGAATCCCAACTACAATAAGTGGTTGGAGCTT |
| | CTTGAGCAAAATATTGATGCCTACAAAACCTTCCCTAAGAAGGAAAAGAAACAAAAGGCACCAAAAG |
| | AAGAATCAACAGACCAAATGTCTGAACCTCCTAAGGAGCATCGTGTGCAAGGTACTCAGCGCACTCG |
| | CACCCGTCCAAGTGTTCAGCCTGGTCCAATGATTGATGTTAACACTGATTAGTGTCACTCAAAGTAA |
| | CAAGATCGCGGCAATCGTTTGTGTTTGGTAACCCCATCTCACCATCGCTTGTCCACTCTTGCACAGA |
| | ATGGAATCATGTTGTAATTACAGTGCAATAAGGTAATTATAACCCATTTAATTGATAGCTATGCTTT |
| | ATTAAAGTGTGTAGCTGTAGAGAGAATGTTAAAGACTGTCACCTCTGCGTGATTGCAAGTGAACAGT |
| | GCCCCCCGGGAAGAGCTCTACAGTGTGAAATGTAAATAAAAATAGCTATTATTCAATTAGATTAGGC |
| | TAATTAGATGATTTGCAAAAAAAAAAAA |
| 4 | GenBank Accession No. KX154693.1 (Middle East Respiratory Syndrome |
| | Coronavirus Isolate Hu/Riyadh-KSA-13127/2016, complete genome) |
| | ATCTCACTTCCCCTCGTTCTCTTGCAGAACTTTGATTTTAACGAACTTAAATAAAAGCCCTGTTGTT |
| | TAGCGTATTGTTGCACTTGTCTGGTGGGATTGTGGCACTAATCTGCCTGCTCATCTAGGCAGTGGAC |
| | ATATGCTCAACACTGGGTATAATTCTAATTGAATACTATTTTTCAGTTAGAGCGTCGTGTCTCTTGT |
| | ACGTCTCGGTCACAATATACGGTTTCGTCCGGTGCGTGGCAATTCGGGGCACATCATGTCTTTCGTG |
| | GCTGGTGTGATCGCGCAAGGTGCGCGCGGTACGTATCGAGCAGCGCTCAACTCTGAAAAACATCAAG |
| | ACCATGTGTCTCTAACTGTGCCACTCTGTGGTTCAGGAAACCTGGTTGAAAAACTTTCACCATGGTT |
| | CATGGATGGCGAAAATGCCTATGAAGTGGTGAAGGCCATGTTACTTAAAAAAGAGCCACTTCTCTAT |
| | GTGCCCATCCGGCTGGCTGGACACACTAGACACCTCCCAGGTCCTCGTGTGTACCTGGTTGAGAGGC |
| | TCATTGCTTGTGAAAATCCATTCATGGTTAACCAATTGGCTTATAGCTCTAGTGCAAATGGCAGCCT |
| | GGTTGGCACAACTTTGCAGGGCAAGCCTATTGGTATGTTCTTCCCTTATGACATCGAACTTGTCACA |
| | GGAAAGCAAAATATTCTCCTGCGCAAGTATGGCCGTGGTGGTTATCACTACACCCCAGTCCACTATG |
| | AGCGAGACAACACCTCTTGCCCTGAGTGGATGGACGATTTTGAGGCGGATCCTAAAGGCAAATATGC |
| | CCAGAATCTGCTTAAGAAGTTGATTGGCGGTGATGTCACTCCAGTTGACCAATACATGTGTGGCGTT |
| | GATGGAAAACCCATTAGTGCCTACGCATTTTTAATGGCCAAGGATGGAATAACCAAACTGGCTGATG |
| | TTGAAGCGGACGTCGCAGCACGTGCTGATGACGAAGGCTTCATCACATTAAAGAACAATCTATATAG |
| | ATTGGTTTGGCATGTTGAGCGTAAAGACGTTCCATATCCTAAGCAATCTATTTTTACTATTAATAGT |
| | GTGGTCCAAAAGGATGGTGTTGAAAACACTCCTCCTCACTATTTTACTCTTGGATGCAAAATTTTAA |
| | CGCTCACCCCACGTAACAAGTGGAGTGGCGTTTCTGACTTGTCCCTCAAACAAAAACTCCTTTACAC |
| | CTTCTATGGTAAGGAGTCACTTGAGAACCCAACCTACATTTACCACTCCGCATTCATTGAGTGTGGA |
| | AGTTGTGGTAATGATTCCTGGCTTACAGGGAATGCTATCCAAGGGTTTGCCTGTGGATGTGGGGCAT |
| | CATATACAGCTAATGATGTTGAAGTCCAATCATCTGGCATGATTAAGCCAAATGCTCTTCTTTGTGC |
| | TACTTGCCCCTTTGCTAAGGGTGACAGCTGTTCTTCTAATTGCAAACATTCAGTTGCTCAGTTGGTT |
| | AGTTACCTTTCTGAACGCTGTAATGTTATTGCTGATTCTAAGTCCTTCACACTTATCTTTGGTGGCG |
| | TAGCTTACGCCTACTTTGGATGTGAGGAAGGTACTATGTACTTTGTGCCTAGAGCTAAGTCTGTTGT |
| | CTCAAGGATTGGAGACTCCATCTTTACAGGCTGTACTGGCTCTTGGAACAAGGTCACTCAAATTGCT |
| | AACATGTTCTTGGAACAGACTCAGCATTCCCTTAACTTTGTGGGAGAGTTCGTTGTCAACGATGTTG |
| | TCCTCGCAATTCTCTCTGGAACCACAACTAATGTTGACAAAATACGCCAGCTTCTCAAAGGTGTCAC |
| | CATTGACAAGTTGCGTGATTATTTAGCTGACTATGACGTAGCAGTCACTGCCGGCCCATTCATGGAT |
| | AATGCTATTAATGTTGGTGGTACAGGATTACAGTATGCCGCCATTACTGCACCTTATGTAGTTCTCA |
| | CTGGCTTAGGTGAGTCCTTTAAGAAAGTTGCAACCATACCGTACAAGGTTTGCAACTCTGTTAAGGA |
| | TACTCTGACTTATTATGCTCACAGCGTGTTGTACAGAGTTTTTCCTTATGACATGGATTCTGGTGTG |
| | TCATCCTTTAGTGAACTACTTTTTGATTGCGTTGATCTTTCAGTAGCTTCTACCTATTTTTTAGTCC |
| | GCCTCTTGCAAGATAAGACTGGCGACTTTATGTCTACAATTATTACTTCCTGCCAAACTGCTGTTAG |
| | TAAGCTTCTAGATACATGTTTTGAAGCTACAGAAGCAACATTTAACTTCTTGTTAGATTTGGCAGGA |
| | TTGTTCAGAATCTTTCTTCGCAATGCCTATGTGTACACTTCACAAGGGTTTGTGGTGGTCAATGGCA |
| | AAGTTTCTACACTTGTCAAACAAGTGTTAGACTTGCTTAATAAGGGTATGCAACTTTTGCATACAAA |
| | GGTCTCCTGGGCTGGTTCTAACATCAGTGCTGTTATCTACAGCGGCAGGGAGTCTCTAATATTCCCA |
| | TCGGGAACCTATTACTGTGTCACCACTAAGGCTAAGTCCGTTCAACAAGATCTTGACGTTATTTTGC |
| | CTGGTGAGTTTTCCAAGAAGCAGTTAGGACTGCTCCAACCTACTGACAATTCTACAACTGTTAGTGT |
| | TACTGTATCCAGTAACATGGTTGAAACTGTTGTGGGTCAACTTGAGCAAACTAATATGCACAGTCCT |
| | GATGTTATAGTAGGTGACTATGTCATTATTAGTGAAAAATTGTTTGTGCGTAGTAAGGAAGAAGACG |
| | GATTCGCCTTCTACCCTGCTTGCACTAATGGTCATGCTGTACCGACTCTCTTTAGACTTAAGGGAGG |
| | TGCACCTGTAAAAAAAGTAGCCTTTGGCGGTGATCAAGTACATGAGGTTGCTGCTGTAAGAAGTGTT |
| | ACTGTCGAGTACAACATTCATGCTGTATTAGACACACTACTTGCTTCTTCTAGTCTTAGAACCTTTG |
| | TTGTAGATAAGTCTTTGTCAATTGAGGAGTTTGCTGACGTAGTAAAGGAACAAGTCTCAGACTTGCT |
| | TGTTAAATTACTGCGTGGAATGCCGATTCCAGATTTTGATTTAGACGATTTTATTGACGCACCATGC |
| | TATTGCTTTAACGCTGAGGGTGATGCATCTTGGTCTTCTACTATGATCTTCTCTCTTCACCCCGTCG |
| | AGTGTGACGAGGAGTGTTCTGAAGTAGAGGCTTCAGATTTAGAAGAAGGTGAATCAGAGTGCATTTC |
| | TGAGACTTCAACTGAACAAGTTGACGTTTCTCATGAGGTTTCTGACGACGAGTGGGCTGCTGCAGTT |
| | GATGAAGCGTTCCCCCTCGATGAAGCAGAAGATGTTACTGAATCTGTGCAAGAAGAAGCACAACCAG |
| | TAGAAGTACCTGTTGAAGATATTGTGCAGGTTGTCATAGTTGACACCTTACAGGAAACTCCTGTTGT |
| | GTCTGATACTGTTGAAGTCCCACCGCAAGTGGTGAAACTTCCGTCTGAACCTCAGACTATCCAGCCC |
| | GAGGTAAAAGAAGTTGCACCTGTCTATGAGGCTGATACCGAACAGACACAGAGTGTTACTGTTAAAC |
| | CTAAGAGGTTACGCAAAAAGCGTAATGTTGACCCTTTGTCCAATTTTGAACATAAGGTTATTACAGA |
| | GTGCGTTACCATAGTTTTAGGTGACGCAATTCAAGTAGCCAAGTGCTATGGGGAGTCTGTGTTAGTT |
| | AATGCTGCTAACACACATCTTAAGCATGGCGGTGGTATCGCTGGTGCTATTAATGCGGCTTCAAAAG |
| | GGGCTGTCCAAAAAGAGTCAGATGAGTATATTCTGGCTAAAGGGCCGTTACAAGTAGGAGATTCAGT |
| | TCTCTTGCAAGGCCATTCTCTAGCTAAGAATATCCTGCATATCGTAGGCCCAGATGCCCGCGCTAAA |
| | CAGGATGTTTCTCTCCTTAGTAAGTGCTATAAGGCTATGAATGCATATCCTCTTGTAGTCACTCCTC |
| | TTGTTTCAACAGGCATATTTGGTGTAAAACCAGCTGTGTCTTTTGATTATCTTATTAGAGAGGCTAA |
| | GACTAGAGTTTTAGTCGTCGTTAATTCCCAAGATGTCTATAAGAGTCTTACCATAGTTGACATTCCA |
| | CAGAGTTTGACTTTTTCATATGATGGGTTACGTGGCGCAATACGTAAAGCTAAAGATTATGGTTTTA |
| | CTGTTTTTGTGTGCACAGACAACTCTGCTAACACTAAAGTTCTTAGGAACAAGGGTGTTGATTATAC |
| | TAAGAAGTTTCTTACAGTTGACGGTGTGCAATATTATTGCTACACGTCTAAGGACACTTTAGATGAT |
| | ATCTTACAACAGGCTAATAAGTCTGTTGGTATTATATCTATGCCTTTGGGATATGTGTCTCATGGTT |
| | TAGACTTAATTCAAGCAGGGAGTGTCGTGCGTAGAGTTAACGTGCCCTACGTGTGTCTCCTAGCTAA |
| | TAAAGAGCAAGAAGCTATTTTGATGTCTGAAGACGTTAAGTTAAACCCTTCAGAAGATTTTATAAAG |
| | CACGTCCGCACTAATGGTGGTTACAATTCTTGGCATTTAGTCGAGGGTGAACTATTGGTGCAAGACT |
| | TACGCTTAAATAAGCTCCTGCATTGGTCTGATCAAACCATATGCTACAAGGATAGTGTGTTTTATGT |
| | TGTAAAGAATAGTACAGCTTTTCCATTTGAAACACTTTCAGCATGTCGTGCGTATTTGGATTCACGC |
| | ACGACACAGCAGTTAACAATCGAAGTCTTAGTGACTGTCGATGGTGTAAATTTTAGAACAGTCGTTC |
| | TAAATAATAAGAACACTTATAGATCACAGCTTGGATGCGTTTTCTTTAATGGTGCTGATATTTCTGA |
| | TACCATTCCTGATGAGAAACAGAATGGTCACAGTTTATATCTAGCAGACAATTTGACTGCTGATGAA |
| | ACAAAGGCGCTTAAAGAGTTATATGGCCCCGTTGATCCTACTTTCTTACACAGATTCTATTCACTTA |
| | AGGCTGCAGTCCATAAGTGGAAGATGGTTGTGTGTGATAAGGTACGTTCTCTCAAATTGAGTGATAA |
| | TAATTGTTATCTTAATGCAGTTATTATGACACTTGATTTATTGAAGGACATTAAATTTGTTATACCT |
| | GCTCTACAGCATGCATTTATGAAACATAAGGGCGGTGATTCAACTGACTTCATAGCCCTCATTATGG |
| | CTTATGGCAATTGCACATTTGGTGCTCCAGATGATGCCTCTCGGTTACTTCATACCGTGCTTGCAAA |
| | GGCTGAGTTATGCTGTTCTGCACGCATGGTTTGGAGAGAGTGGTGCAATGTCTGTGGCATAAAAGAT |
| | GTTGTTCTACAAGGCTTAAAAGCTTGTTGTTACGTGGGTGTGCAAACTGTTGAAGATCTGCGTGCTC |
| | GCATGACATATGTATGCCAGTGTGGTGGTGAACGTCATCGGCAAATAGTCGAACACACCACCCCCTG |
| | GTTGCTGCTCTCAGGCACACCAAATGAAAAATTGGTGACAACCTCCACGGCGCCTGATTTTGTAGCG |
| | TTTAATGTCTTTCAGGGCATTGAAACGGCTGTTGGCCATTATGTTCATGCTCGCCTGAAGGGTGGTC |
| | TTATTTTAAAGTTTGACTCTGGCACCGTTAGCAAGACTTCAGACTGGAAGTGCAAGGTGACAGATGT |
| | ACTTTTCCCCGGCCAAAAATACAGTAGCGATTGTAATGTCGTACGGTATTCTTTGGACGGTAATTTC |
| | AGAACAGAGGTTGATCCCGACCTATCTGCTTTCTATGTTAAGGATGGTAAATACTTTACAAGTGCAC |
| | CACCCGTAACATATTCACCAGCTACAATTTTAGCTGGTAGTGTCTACACTAATAGCTGCCTTGTATC |
| | GTCTGATGGACAACCTGGCGGTGATGCTATTAGTTTGAGTTTTAATAACCTTTTAGGGTTTGATTCT |
| | AGTAAACCAGTCACTAAGAAATACACTTACTCCTTCTTGCCTAAAGAAGACGGCGATGTGTTGTTGG |
| | CTGAGTTTGACACTTATGACCCTATTTATAAGAATGGTGCCATGTATAAAGGCAAACCAATTCTTTG |
| | GGTCAACAAAGCATCTTATGATACTAATCTTAATAAGTTCAATAGAGCTAGTTTGCGTCAAATTTTT |
| | GACGTAGCCCCCATTGAACTCGAAAATAAATTCACACCTTTGAGTGTGGCGTCCACACCAGTTGAAC |
| | CTCCAACTGTAGATGTGGTAGCACTTCAACAGGAAATGACAATTGTCAAATGTAAGGGTTTAAATAA |
| | ACCTTTCGTGAAGGACAATGTCAGTTTCGTTGTTGATGACTCAGGTACTCCCGTTGTTGAGTATCTG |
| | TCTAAAGAAGATCTACATACATTGTATGTAGACCCTAAGTATCAAGTCATTGTCTTAAAAGACAATG |
| | TACTTTCTTCTATGCTTAGATTGCACACCGTTGAGTCAGGTGATATTAACGTTGTTGCAGCTTCCGG |
| | ATCTTTGACACGTAAAGTGAAGTTACTATTTAGGGCTTCATTTTATTTCAAAGAATTTGCTACCCGC |
| | ACTTTCACTGCTACCACTGCTGTAGGTAGTTGTATAAAGAGTGTAGTGCGGCATCTAGGTGTTACTA |
| | AAGGCATATTGACAGGCTGTTTTAGTTTTGTCAAGATGTTATTTATTCTTCCACTAGCTTACTTTAG |
| | TGATTCAAAACTCGGCACCACAGAGGTTAAAGTGAGTGCTTTGAAAACAGCTGGCGTTGTGACAGGT |
| | AATGTTGTAAAACAGTGTTGCACTGCTGCTGTTGATTTAAGTATGGATAAGTTGCGCCGTGTGGATT |
| | GGAAATCAACCCTACGGTTGTTACTTATGTTATGCACAACTATGGTATTGTTGTCTTCTGTGTATCA |
| | CTTGTATGTCTTCAATCAGGTCTTATCAAGTGATGTTATGTTTGAAGATGCCCAAGGTTTGAAAAAG |
| | TTCTACAAAGAAGTTAGAGCTTACCTAGGAATCTCTTCTGCTTGTGACGGTCTTGCTTCAGCTTATA |
| | GGGCGAATTCATTTGATGTACCTACATTCTGCGCAAACCGTTCTGCAATGTGTAATTGGTGCTTGAT |
| | TAGCCAAGATTCCATAACTCACTACCCAGCTCTTAAGATGGTTCAAACACATCTTAGCCACTATGTT |
| | CTTAACATAGATTGGTTGTGGTTTGCATTTGAGACTGGTTTGGCATACATGCTCTATACCTCGGCCT |
| | TCAACTGGTTGTTGTTGGCAGGTACATTGCATTATTTCTTTGCACAGACTTCCATATTTGTAGACTG |
| | GCGGTCATACAATTATGCTGTGTCTAGTGCCTTCTGGTTATTCACCCACATTCCAATGGCGGGTTTG |
| | GTACGAATGTATAATTTGTTAGCATGCCTTTGGCTTTTACGCAAGTTTTATCAGCATGTAATCAATG |
| | GTTGCAAAGATACGGCATGCTTGCTCTGCTATAAGAGGAACCGACTTACTAGAGTTGAAGCTTCTAC |
| | CGTTGTCTGTGGTGGAAAACGTACGTTTTATATCACAGCAAATGGCGGTATTTCATTCTGTCGTAGG |
| | CATAATTGGAATTGTGTGGATTGTGACATTGCAGGTGTGGGGAATACCTTCATCTGTGAAGAAGTCG |
| | CAAATGACCTCACTACCGCCCTACGCAGGCCTATTAACGCTACGGATAGATCACATTATTATGTGGA |
| | TTCCGTTACAGTTAAAGAGACTGTTGTTCAGTTTAATTATCGTAGAGACGGTCAACCATTCTACGAG |
| | CGGTTTCCCCTCTGCGCTTTTACAAATCTAGATAAGTTGAAGTTCAAAGAGGTCTGTAAAACTACTA |
| | CTGGTATACCTGAATACAACTTTATCATCTACGACTCATCAGATCGTGGCCAGGAAAGTTTAGCTAG |
| | GTCTGCATGTGTTTATTATTCTCAAGTCTTGTGTAAATCAATTCTTTTGGTTGACTCAAGTTTGGTT |
| | ACTTCTGTTGGTGATTCTAGTGAAATCGCCACTAAAATGTTTGATTCCTTTGTTAATAGTTTCGTCT |
| | CGCTGTATAATGTCACACGCGATAAGTTGGAAAAACTTATCTCTACTGCTCGTGATGGCGTAAGGCG |
| | AGGCGATAACTTCCATAGTGTCTTAACAACATTCATTGACGCAGCACGAGGCCCCGCAGGTGTGGAG |
| | TCTGATGTTGAGACCAATGAAATTGTTGACTCTGTGCAGTATGCTCATAAACATGACATACAAATTA |
| | CTAATGAGAGTTACAATAATTATGTACCCTCATATGTTAAACCTGATAGTGTGTCTACCAGTGATTT |
| | AGGTAGTCTCATTGATTGTAATGCGGCTTCAGTTAACCAAATTGTCTTGCGTAATTCTAATGGTGCT |
| | TGTATTTGGAACGCTGCTGCATATATGAAACTCTCGGATGCACTTAAACGACAGATTCGCATTGCAT |
| | GCCGTAAGTGTAATTTAGCTTTCCGGTTAACCACCTCAAAGCTACGCGCTAATGATAATATCTTATC |
| | AGTTAGATTCACTGCTAACAAAATTGTTGGTGGTGCTCCTACATGGTTTAATGTGTTGCGTGACTTT |
| | ACGTTAAAGGGTTACGTTCTTGCTACCATTATTGTGTTTCTGTGTGCTGTACTGATGTATTTGTGTT |
| | TACCTACATTTTCTATGGTACCTGTTGAATTTTATGAAGACCGCATCTTGGACTTTAAAGTTCTTGA |
| | TAATGGTATCATTAGGGATGTAAATCCTGATGATAAGTGCTTTGCTAATAAGCACCGGTCCTTCACA |
| | CAATGGTATCATGAGCATGTTGGTGGTGTCTATGACAACTCTATCACATGCCCATTGACAGTTGCAG |
| | TAATTGCTGGAGTTGCTGGTGCTCGCATTCCAGACGTACCTACTACATTGGCTTGGGTGAACAATCA |
| | GATAATTTTCTTTGTTTCTCGAGTCTTTGCTAATACAGGCAGTGTTTGCTACACTCCTATAGATGAG |
| | ATACCCTATAAGAGTTTCTCTGATAGTGGTTGCATTCTTCCATCTGAGTGCACTATGTTTAGGGATG |
| | CAGAGGGCCGTATGACACCATACTGCCATGATCCTACTGTTTTGCCTGGGGCTTTTGCGTACAGTCA |
| | GATGAGGCCTCATGTTCGTTACGACTTGTATGATGGTAACATGTTTATTAAATTTCCTGAAGTAGTA |
| | TTTGAAAGTACACTTAGGATTACTAGAACTCTGTCAACTCAGTACTGCCGGTTCGGTAGTTGTGAGT |
| | ATGCACAAGAGGGTGTTTGTATTACCACAAATGGCTCGTGGGCCATTTTTAATGACCACCATCTTAA |
| | TAGACCTGGTGTCTATTGTGGCTCTGATTTTATTGACATTGTCAGGCGGTTAGCAGTATCACTGTTC |
| | CAGCCTATTACTTATTTCCAATTGACTACCTCATTGGTCTTGGGTATAGGTTTGTGTGCATTCCTGA |
| | CTTTGCTCTTCTATTATATTAATAAAGTAAAACGTGCTTTTGCAGATTACACCCAGTGTGCTGTAAT |
| | TGCTGTTGTTGCTGCTGTTCTTAATAGCTTGTGCATCTGCTTTGTTGCCTCTATACCATTGTGTATA |
| | GTACCTTACACTGCATTGTACTATTATGCTACATTCTATTTTACTAATGAGCCTGCATTTATTATGC |
| | ATGTTTCTTGGTACATTATGTTCGGGCCTATCGTTCCCATATGGATGACCTGCGTCTATACAGTTGC |
| | AATGTGCTTTAGACACTTCTTCTGGGTTTTAGCTTATTTTAGTAAGAAACATGTAGAAGTTTTTACT |
| | GACGGTAAGCTTAATTGTAGTTTCCAGGACGCTGCCTCTAATATCTTTGTTATTAACAAGGACACTT |
| | ATGCAGCTCTTAGAAACTCTTTAACTAATGATGCCTATTCACGATTTTTGGGGTTGTTTAACAAGTA |
| | TAAGTACTTCTCTGGTGCTATGGAAACAGCCGCTTATCGTGAAGCTGCAGCATGTCATCTTGCTAAA |
| | GCCTTACAAACATACAGCGAGACTGGTAGTGATCTTCTTTACCAACCACCCAACTGTAGCATAACCT |
| | CTGGCGTGTTGCAAAGCGGTTTGGTGAAAATGTCACATCCCAGTGGAGATGTTGAGGCTTGTATGGT |
| | TCAGGTTACCTGCGGTAGCATGACTCTTAATGGTCTTTGGCTTGACAACACAGTCTGGTGCCCACGA |
| | CACGTAATGTGCCCGGCTGACCAGTTGTCTGATCCTAATTATGATGCCTTGTTGATTTCTATGACTA |
| | ATCATAGTTTCAGTGTGCAAAAACACATTGGCGCTCCAGCAAACTTGCGTGTTGTTGGTCATGCCAT |
| | GCAAGGCACTCTTTTGAAGTTGACTGTCGATGTTGCTAACCCTAGCACTCCAGCCTACACTTTTACA |
| | ACAGTGAAACCTGGCGCAGCATTTAGTGTGTTAGCATGCTATAATGGTCGTCCGACTGGTACATTCA |
| | CTGTTGTAATGCGCCCTAACTACACAATTAAGGGTTCCTTTCTGTGTGGTTCTTGTGGTAGTGTTGG |
| | TTACACCAAGGAGGGTAGTGTGATCAATTTTTGTTACATGCATCAAATGGAACTTGCTAATGGTACA |
| | CATACCGGTTCAGCATTTGATGGTACTATGTATGGTGCCTTTATGGATAAACAAGTGCACCAAGTTC |
| | AGTTAACAGACAAATACTGCAGTGTTAATGTAGTAGCTTGGCTTTACGCAGCAATACTTAATGGTTG |
| | CGCTTGGTTTGTAAAACCTAATCGCACTAGTGTTGTTTCTTTTAATGAATGGGCTCTTGCCAACCAA |
| | TTCACTGAATTTGTTGGCACTCAATCCGTTGACATGTTAGCTGTCAAAACAGGCGTTGCTATTGAAC |
| | AGCTGCTTTATGCGATCCAACAACTTTATACTGGGTTCCAGGGAAAGCAAATCCTTGGCAGTACTAT |
| | GTTGGAAGATGAATTCACACCTGAGGATGTTAATATGCAGATTATGGGTGTGGTTATGCAGAGTGGT |
| | GTGAGAAAAGTTACATATGGTACTGCGCATTGGTTGTTCGCGACCCTTGTCTCAACCTATGTGATAA |
| | TCTTACAAGCCACTAAATTTACTTTGTGGAACTACTTGTTTGAGACTATTCCCACACAGTTGTTCCC |
| | ACTCTTATTTGTGACTATGGCCTTCGTTATGTTGTTGGTTAAACACAAACACACCTTTTTGACACTT |
| | TTCTTGTTGCCTGTGGCTATTTGTTTGACTTATGCAAACATAGTCTACGAGCCCACTACTCCCATTT |
| | CGTCAGCGCTGATTGCAGTTGCAAATTGGCTTGCCCCCACTAATGCTTATATGCGCACTACACATAC |
| | TGATATTGGTGTCTACATTAGTATGTCACTTGTATTAGTCATTGTAGTGAAGAGATTGTACAACCCA |
| | TCACTTTCTAACTTTGCGTTAGCATTGTGCAGTGGTGTAATGTGGTTGTACACTTATAGCATTGGAG |
| | AAGCCTCAAGCCCCATTGCCTATCTGGTTTTTGTCACTACACTCACTAGTGATTATACGATTACAGT |
| | CTTTGTTACTGTCAACCTTGCAAAAGTTTGCACTTATGCCATCTTTGCTTACTCACCACAGCTTACA |
| | CTTGTGTTTCCGGAAGTGAAGATGATACTTTTATTATACACATGTTTAGGTTTCATGTGTACTTGCT |
| | ATTTTGGTGTCTTCTCTTTTTTGAACCTTAAGCTTAGAGCACCTATGGGTGTCTATGACTTTAAGGT |
| | CTCAACACAAGAGTTCAGATTCATGACTGCTAACAATCTAACTGCACCTAGAAATTCTTGGGAGGCT |
| | ATGGCTCTGAACTTTAAGTTAATAGGTATTGGCGGTACACCTTGTATAAAGGTTGCTGCTATGCAGT |
| | CTAAACTTACAGATCTTAAATGCACATCTGTGGTTCTCCTCTCTGTGCTCCAACAGTTACACTTAGA |
| | GGCTAATAGTAGGGCCTGGGCTTTCTGTGTTAAATGCCATAATGATATATTGGCAGCAACAGACCCC |
| | AGTGAGGCTTTCGAGAAATTCGTAAGTCTCTTTGCCACTTTAATGACTTTTTCTGGTAATGTAGATC |
| | TTGATGCGTTAGCTAGTGATATTTTTGACACTCCTAGCGTACTTCAAGCTACTCTTTCTGAGTTTTC |
| | ACACTTAGCTACCTTTGCTGAGTTGGAAGCTGCGCAGAAAGCCTATCAGGAAGCTATGGACTCTGGT |
| | GACACCTCACCACAAGTTCTTAAGGCTTTGCAGAAGGCTGTTAATATAGCTAAAAACGCCTATGAGA |
| | AGGATAAGGCAGTGGCCCGTAAGTTAGAACGTATGGCTGATCAGGCTATGACTTCTATGTATAAGCA |
| | AGCACGTGCTGAAGACAAGAAAGCAAAAATTGTCAGTGCTATGCAAACTATGTTGTTTGGTATGATT |
| | AAGAAGCTCGACAACGATGTTCTTAATGGTATCATTTCTAACGCTAGGAATGGTTGTATACCTCTTA |
| | GTGTCATTCCACTGTGTGCTTCAAATAAACTTCGCGTTGTAATTCCTGACTTCACCGTCTGGAATCA |
| | GGTAGTCACATATCCCTCGCTTAACTACGCTGGGGCTTTGTGGGACATTACAGTTATAAACAATGTG |
| | GACAATGAAATTGTTAAGTCTTCAGATGTTGTAGACAGCAATGAAAATTTAACATGGCCACTTGTTT |
| | TAGAATGCACTAGGGCATCCACTTCTGCCGTTAAGTTGCAAAATAATGAGATCAAACCTTCAGGTTT |
| | AAAAACCATGGTTGTGTCTGCAGGTCAAGAGCAAACTAACTGTAATACTAGTTCCTTAGCTTATTAC |
| | GAACCTGTGCAGGGTCGTAAAATGCTGATGGCTCTTCTTTCTGATAATGCCTATCTCAAATGGGCGC |
| | GTGTTGAAGGTAAGGACGGATTTGTTAGTGTAGAGCTACAACCTCCTTGCAAATTCTTGATTGCGGG |
| | ACCAAAAGGACCTGAAATCCGATATCTCTATTTTGTTAAAAATCTTAACAACCTTCATCGCGGGCAA |
| | GTGTTAGGGCACATTGCTGCGACTGTTAGATTGCAAGCTGGTTCTAACACCGAGTTTGCCTCTAATT |
| | CTTCGGTGTTGTCACTTGTTAACTTCACCGTTGATCCTCAAAAAGCTTATCTCGATTTCGTCAATGC |
| | GGGAGGTGCCCCATTGACAAATTGTGTTAAGATGCTTACTCCTAAAACTGGTACAGGTATAGCTATA |
| | TCTGTTAAACCAGAGAGTACAGCTGATCAAGAGACTTATGGTGGAGCTTCAGTGTGTCTCTATTGCC |
| | GTGCGCATATAGAACATCCTGATGTCTCTGGTGTTTGTAAATATAAGGGTAAGTTTGTCCAAATCCC |
| | TGCTCAGTGTGTCCGTGACCCTGTGGGATTTTGTTTGTCAAATACCCCCTGTAATGTCTGTCAATAT |
| | TGGATTGGATATGGGTGCAATTGTGACTCGCTTAGGCAAGTAGCACTGCCCCAATCTAAAGATTCCA |
| | ATTTTTTAAACGAGTCCGGGGTTCTATTGTAAATGCCCGAATAGAACCCTGTTCAAGTGGTTTGTCC |
| | ACTGATGTCGTCTTTAGGGCATTTGACATCTGCAACTATAAGGCTAAGGTTGCTGGTATTGGAAAAT |
| | ACTACAAGACTAATACTTGTAGGTTTGTAGAATTAGATGACCAAGGGCATCATTTAGACTCCTATTT |
| | TGTCGTTAAGAGGCATACTATGGAGAATTATGAACTAGAGAAGCACTGTTACGATTTGTTACGTGAC |
| | TGTGATGCTGTAGCTCCCCATGATTTCTTCATCTTTGATGTAGACAAAGTTAAAACACCTCATATTG |
| | TACGTCAGCGTTTAACTGAGTACACTATGATGGATCTTGTATATGCCCTGAGGCACTTTGATCAAAA |
| | TAGCGAAGTGCTTAAGGCTATCTTAGTGAAGTATGGTTGCTGTGATGTTACCTACTTTGAAAATAAA |
| | CTCTGGTTTGATTTTGTTGAAAATCCCAGTGTTATTGGTGTTTATCATAAACTTGGAGAACGTGTAC |
| | GCCAAGCTATCTTAAACACTGTTAAATTTTGTGACCACATGGTCAAGGCTGGTTTAGTCGGTGTGCT |
| | CACACTAGACAACCAGGACCTTAATGGCAAGTGGTATGATTTTGGTGACTTCGTAATCACTCAACCT |
| | GGTTCAGGAGTAGCTATAGTTGATAGCTACTATTCTTATTTGATGCCTGTGCTCTCAATGACCGATT |
| | GTTTGGCCGCTGAGACACATAGGGATTGTGATTTTAATAAACCACTCATTGAGTGGCCACTTACTGA |
| | GTATGATTTTACTGATTATAAGGTACAACTCTTTGAGAAGTACTTTAAATATTGGGATCAGACGTAT |
| | CACGCAAATTGCGTTAATTGTACTGATGACCGTTGTGTGTTACATTGTGCTAATTTCAATGTATTGT |
| | TTGCTATGACCATGCCTAAGACTTGTTTCGGACCCATAGTCCGAAAGATCTTTGTTGATGGCGTGCC |
| | ATTTGTAGTATCTTGTGGTTATCACTACAAAGAATTAGGTTTAGTCATGAATATGGATGTTAGTCTC |
| | CATAGACATAGGCTCTCTCTTAAGGAGTTGATGATGTATGCCGCTGATCCAGCCATGCACATTGCCT |
| | CCTCTAACGCTTTTCTTGATTTGAGGACATCATGTTTTAGTGTCGCTGCACTTACAACTGGTTTGAC |
| | TTTTCAAACTGTGCGGCCTGGCAATTTTAACCAAGACTTCTATGATTTCGTGGTATCTAAAGGTTTC |
| | TTTAAGGAGGGCTCTTCAGTTACGCTCAAACATTTTTTCTTTGCTCAAGATGGTAATGCTGCTATTA |
| | CAGATTATAATTACTATTCTTATAATCTGCCTACTATGTGTGACATCAAACAAATGTTGTTCTGCAT |
| | GGAAGTTGTAAACAAGTACTTCGAAATCTATGACGGTGGTTGTCTTAATGCTTCTGAAGTGGTTGTT |
| | AATAATTTAGACAAGAGTGCTGGCCATCCTTTTAATAAGTTTGGCAAAGCTCGTGTCTATTATGAGA |
| | GCATGTCTTACCAGGAGCAAGATGAACTCTTTGCCATGACAAAGCGTAACGTCATTCCTACCATGAC |
| | TCAAATGAATCTAAAATATGCTATTAGTGCTAAGAATAGAGCTCGCACTGTTGCAGGCGTGTCCATA |
| | CTTAGCACAATGACTAATCGCCAGTACCATCAGAAAATGCTTAAGTCCATGGCTGCAACTCGTGGAG |
| | CGACTTGCGTCATTGGTACTACAAAGTTCTATGGTGGCTGGGATTTCATGCTTAAAACATTGTACAA |
| | AGATGTTGATAATCCGCATCTTATGGGTTGGGATTACCCTAAGTGTGATAGAGCTATGCCTAATATG |
| | TGTAGAATCTTCGCTTCACTCATATTAGCTCGTAAACATGGCACTTGTTGTACTACAAGGGACAGAT |
| | TTTATCGCTTGGCAAATGAGTGTGCTCAGGTGCTAAGCGAATATGTTCTATGTGGTGGTGGTTACTA |
| | CGTCAAACCTGGAGGTACCAGTAGCGGAGATGCCACCACTGCATATGCCAATAGTGTCTTTAACATT |
| | TTGCAGGCGACAACTGCTAATGTCAGTGCACTTATGGGTGCTAATGGCAACAAGATTGTTGACAAAG |
| | AAGTTAAAGACATGCAGTTTGATTTGTATGTCAATGTTTACAGGAGCACTAGCCCAGACCCCAAATT |
| | TGTTGATAAATACTATGCTTTTCTTAATAAGCACTTTTCTATGATGATACTGTCTGATGACGGTGTC |
| | GTTTGCTATAATAGTGATTATGCAGCTAAGGGTTACATTGCTGGAATACAGAATTTTAAGGAAACGC |
| | TGTATTATCAGAACAATGTCTTTATGTCTGAAGCTAAATGCTGGGTGGAAACCGATCTGAAGAAAGG |
| | ACCACATGAATTCTGTTCACAGCATACGCTTTATATTAAGGATGGCGACGATGGTTACTTCCTTCCT |
| | TATCCAGACCCTTCAAGAATTTTGTCTGCCGGTTGCTTTGTAGATGATATCGTTAAGACTGACGGTA |
| | CACTCATGGTAGAGCGGTTTGTGTCTTTGGCTATAGATGCTTACCCTCTCACAAAGCATGAAGATAT |
| | AGAATACCAGAATGTATTCTGGGTCTACTTACAGTATATAGAAAAACTGTATAAAGACCTTACAGGA |
| | CACATGCTTGACAGTTATTCTGTCATGCTATGTGGTGATAATTCTGCTAAGTTTTGGGAAGAGGCAT |
| | TCTACAGAGATCTCTATAGTTCGCCTACCACTTTGCAGGCTGTCGGTTCATGCGTTGTATGCCATTC |
| | ACAGACTTCCCTACGCTGTGGGACATGCATCCGTAGACCATTTCTCTGCTGTAAATGCTGCTATGAT |
| | CATGTTATAGCAACTCCACATAAGATGGTTTTGTCTGTTTCTCCTTACGTTTGTAATGCCCCTGGTT |
| | GTGGCGTTTCAGACGTTACTAAGCTATATTTAGGTGGTATGAGCTACTTTTGTGTAGATCATAGACC |
| | TGTGTGTAGTTTTCCACTTTGCGCTAATGGTCTTGTATTCGGCTTATACAAGAATATGTGCACAGGT |
| | AGTCCTTCTATAGTTGAATTTAATAGGTTGGCTACCTGTGACTGGACTGAAAGTGGTGATTACACCC |
| | TTGCCAATACTACAACAGAACCACTTAAACTTTTTGCTGCTGAGACTTTACGTGCCACTGAAGAGGC |
| | GTCTAAGCAGTCTTATGCTATTGCCACCATCAAAGAAATTGTTGGTGAGCGCCAACTATTACTTGTG |
| | TGGGAGGCTGGCAAGTCCAAACCACCACTCAATCGTAATTATGTTTTTACTGGTTATCATATAACCA |
| | AAAATAGTAAAGTGCAGCTCGGTGAGTACATCTTCGAGCGCATTGATTATAGTGATGCTGTATCCTA |
| | CAAGTCTAGTACAACGTATAAACTGACTGTAGGTGACATCTTCGTACTTACCTCTCACTCTGTGGCT |
| | ACCTTGACGGCGCCCACAATTGTGAATCAAGAGAGGTATGTTAAAATTACTGGGTTGTACCCAACCA |
| | TTACGGTACCTGAAGAGTTCGCAAGTCATGTTGCCAACTTCCAAAAATCAGGTTATAGTAAATATGT |
| | CACTGTTCAGGGACCACCTGGCACTGGCAAAAGTCATTTTGCTATAGGGTTAGCGATTTACTACCCT |
| | ACAGCACGTGTTGTTTATACAGCATGTTCACACGCAGCTGTTGATGCTTTGTGTGAAAAAGCTTTTA |
| | AATATTTGAACATTGCTAAATGTTCCCGTATCATTCCTGCAAAGGCACGTGTTGAGTGCTATGACAG |
| | GTTTAAAGTTAATGAGACAAATTCTCAATATTTGTTTAGTACTATTAATGCTCTACCAGAAACTTCT |
| | GCCGATATTCTGGTGGTTGATGAGGTTAGTATGTGCACTAATTATGATCTTTCAATTATTAATGCAC |
| | GTATTAAAGCTAAGCACATTGTCTATGTAGGAGATCCAGCACAGTTGCCAGCTCCTAGGACTTTGTT |
| | GACTAGAGGCACATTGGAACCAGAAAATTTCAATAGTGTCACTAGATTGATGTGTAACTTAGGTCCT |
| | GACATATTTTTAAGTATGTGCTACAGGTGTCCTAAGGAAATAGTAAGCACTGTGAGCGCTCTTGTCT |
| | ACAATAATAAATTGTTAGCCAAGAAGGAGCTTTCAGGCCAGTGCTTTAAAATACTCTATAAGGGCAA |
| | TGTGACGCATGATGCTAGCTCTGCCATTAATAGACCACAACTCACATTTGTGAAGAATTTTATTACT |
| | GCCAATCCGGCATGGAGTAAGGCAGTCTTTATTTCGCCTTATAATTCACAGAATGCTGTGGCTCGTT |
| | CAATGCTGGGTCTTACTACTCAGACTGTTGATTCCTCACAGGGTTCAGAATACCAGTATGTTATCTT |
| | CTGTCAAACAGCAGATACGGCACATGCTAACAACATTAACAGATTTAATGTTGCAATCACTCGTGCC |
| | CAAAAAGGTATTCTTTGTGTTATGACATCTCAGGCACTCTTTGAGTCCTTAGAGTTTACTGAATTGT |
| | CTTTTACTAATTACAAGCTCCAGTCTCAGATTGTAACTGGCCTTTTTAAAGATTGCTCTAGAGAAAC |
| | TTCTGGCCTCTCACCTGCTTATGCACCAACATACGTTAGTGTTGATGACAAGTATAAGACGAGTGAT |
| | GAGCTTTGCGTGAATCTTAATTTACCCGCAAATATCCCATACTCTCGTGTTATTTCCAGGATGGGCT |
| | TTAAACTCGATGCAACAGTTCCTGGATATCCTAAGCTTTTCATTACTCGTGAAGAGGCTGTAAGGCA |
| | AGTTCGAAGCTGGATAGGCTTCGATGTTGAGGGTGCTCATGCTTCCCGTAATGCATGTGGCACCAAT |
| | GTGCCTCTACAATTAGGATTTTCAACTGGTGTGAACTTTGTTGTTCAGCCAGTTGGTGTTGTAGACA |
| | CTGAGTGGGGTAACATGTTAACGGGCATTGCTGCCCGTCCTCCACCAGGTGAACAGTTTAAGCACCT |
| | CGTGCCTCTTATGCATAAGGGGGCTGCGTGGCCTATTGTTAGACGACGTATAGTGCAAATGTTGTCA |
| | GACACTTTAGACAAATTGTCTGATTACTGTACGTTTGTTTGTTGGGCTCATGGCTTTGAATTAACGT |
| | CTGCATCATACTTTTGCAAGATAGGTAAGGAACAGAAGTGTTGCATGTGCAATAGACGCGCTGCAGC |
| | GTACTCTTCACCTCTGCAATCTTATGCCTGCTGGACTCATTCCTGCGGTTATGATTATGTCTACAAC |
| | CCTTTCTTTGTCGATGTTCAACAGTGGGGTTATGTAGGCAATCTTGCTACTAATCACGATCGTTATT |
| | GCTCTGTCCATCAAGGAGCTCATGTGGCTTCTAATGATGCAATAATGACTCGTTGTTTAGCTATTCA |
| | TTCTTGTTTTATAGAACGTGTGGATTGGGATATAGAGTATCCTTATATCTCACATGAAAAGAAATTG |
| | AATTCCTGTTGTAGAATCGTTGAGCGCAACGTCGTACGTGCTGCTCTTCTTGCCGGTTCATTTGACA |
| | AAGTCTATGATATTGGCAATCCTAAAGGAATTCCTATTGTTGATGACCCTGTGGTTGATTGGCATTA |
| | TTTTGATGCACAGCCCTTGACCAGAAAGGTACAACAGCTTTTCTATACAGAGGACATGGCCTCAAGA |
| | TTTGCTGATGGGCTCTGCTTATTTTGGAACTGTAATGTACCAAAATATCCTAATAATGCAATTGTAT |
| | GCAGGTTTGACACACGTGTGCATTCTGAGTTCAATTTGCCAGGTTGTGATGGCGGTAGTTTGTATGT |
| | TAACAAGCACGCTTTTCATACACCAGCATATGATGTGAGTGCATTCCGTGATCTGAAACCTTTACCA |
| | TTCTTTTATTATTCTACTACACCATGTGAAGTGCATGGTAATGGTAGTATGATAGAGGATATTGATT |
| | ATGTACCCCTAAAATCTGCAGTCTGTATTACAGCTTGTAATTTAGGGGGCGCTGTTTGTAGGAAGCA |
| | TGCTACAGAGTACAGAGAGTATATGGAAGCATATAATCTTGTCTCTGCATCAGGTTTCCGCCTTTGG |
| | TGTTATAAGACCTTTGATATTTATAATCTCTGGTCTACTTTTACAAAAGTTCAAGGTTTGGAAAACA |
| | TTGCTTTTAATGTTGTTAAACAAGGCCATTTTATTGGTGTTGAGGGTGAACTACCTGTAGCTGTAGT |
| | CAATGATAAGATCTTCACCAAGAGTGGCGTTAATGACATTTGTATGTTTGAGAATAAAACCACTTTG |
| | CCTACTAATATAGCTTTTGAACTCTATGCTAAGCGTGCTGTACGCTCGCATCCCGATTTCAAATTGC |
| | TACACAATTTACAAGCAGACATTTGCTACAAGTTCGTCCTTTGGGATTATGAACGTAGCAATATTTA |
| | TGGTACTGCTACTATTGGTGTATGTAAGTACACTGATATTGATGTTAATTCAGCTTTGAATATATGT |
| | TTTGACATACGCGATAATGGTTCATTGGAGAAGTTCATGTCTACTCCCAATGCCATCTTTATTTCTG |
| | ATAGAAAAATTAAGAAATACCCTTGTATTGTAGGTCCTGATTATGCTTACTTCAATGGTGCTATCAT |
| | CCGTGATAGTGATGTTGTTAAACAACCAGTGAAGTTCTACTTGTATAAGAAAGTCAATAATGAGTTT |
| | ATTGATCCTACTGAGTGTATTTACACTCAGAGTCGCTCTTGTAGTGACTTCCTACCCCTGTCTGACA |
| | TGGAGAAAGACTTTCTATCTTTTGATAGTGATGTTTTCATTAAGAAGTATGGCTTGGAAAACTATGC |
| | TTTTGAGCACGTAGTCTATGGAGACTTCTCTCATACTACGTTAGGCGGTCTTCACTTGCTTATTGGT |
| | TTATACAAGAAGCAACAGGAAGGTCATATTATTATGGAAGAAATGCTAAAAGGTAGCTCAACTATTC |
| | ATAACTATTTTATTACTGAGACTAACACAGCGGCTTTTAAGGCGGTGTGTTCTGTTATAGATTTAAA |
| | GCTTGACGACTTTGTTATGATTTTAAAGAGTCAAGACCTTGGCGTAGTATCCAAGGTTGTCAAGGTT |
| | TCTATTGACTTAACAATGATTGAGTTTATGTTATGGTGTAAGGATGGACAGGTTCAAACCTTCTACC |
| | CTCGACTCCAGGCTTCTGCAGATTGGAAACCTGGTCATGCAATGCCATCCCTCTTTAAAGTTCAAAA |
| | TGTAAACCTTGAACGTTGTGAGCTTGCTAATTACAAGCAATCTATTCCTATGCCTCGCGGTGTGCAC |
| | ATGAACATCGCTAAATATATGCAATTGTGCCAGTATTTAAATACTTGCACATTAGCCGTGCCTGCCA |
| | ATATGCGTGTTATACATTTTGGCGCTGGTTCTGATAAAGGTATCGCTCCTGGTACATCAGTTTTACG |
| | ACAGTGGCTTCCTACAGATGCCATTATTATAGATAATGATTTAAATGAGTTCGTGTCAGATGCTGAC |
| | ATAACTTTATTTGGAGATTGTGTAACTGTACGTGTCGGCCAACAAGTGGATCTTGTTATTTCCGACA |
| | TGTATGATCCTACTACTAAGAATGTAACAGGTAGTAATGAGTCAAAGGCTTTATTCTTTACTTACCT |
| | GTGTAACCTCATTAATAATAATCTTGCTCTTGGTGGGTCTGTTGCTATTAAAATAACAGAACACTCT |
| | TGGAGCGTTGAACTTTATGAACTTATGGGAAAATTTGCTTGGTGGACTGTTTTCTGCACCAATGCAA |
| | ATGCATCCTCATCTGAAGGATTCCTCTTAGGTATTAATTACTTGGGTACTATTAAAGAAAATATAGA |
| | TGGTGGTGCTATGCACGCCAACTATATATTTTGGAGAAATTCCACTCCTATGAATCTGAGTACTTAC |
| | TCACTTTTTGATTTATCCAAGTTTCAATTAAAATTAAAAGGAACACCAGTTCTTCAATTAAAGGAGA |
| | GTCAAATTAACGAACTCGTAATATCTCTCCTGTCGCAGGGTAAGTTACTTATCCGTGACAATGATAC |
| | ACTCAGTGTTTCTACTGATGTTCTTGTTAACACCTACAGAAAGTTACGTTGATGTAGGGCCAGATTC |
| | TGTTAAGTCTGCTTGTATTGAGGTTGATATACAACAGACTTTCTTTGATAAAACTTGGCCTAGGCCA |
| | ATTGATGTTTCTAAGGCTGACGGTATTATATACCCTCAAGGCCGTACATATTCTAACATAACTATCA |
| | CTTATCAAGGTCTTTTTCCCTATCAGGGAGACCATGGTGATATGTATGTCTACTCTGCAGGACATGC |
| | TACAGGCATAACTCCACAAAAGTTGTTTGTAGCTAACTATTCTCAGGACGTCAAACAGTTTGCTAAT |
| | GGGTTTGTCGTCCGTATAGGAGCAGCTGCCAATTCCACTGGCACTGTTATTATTAGCCCATCTACCA |
| | GCGCTACTATACGAAAAATTTACCCTGCTTTTATGCTGGGTTCTTCAGTTGGTAATTTTTCAGATGG |
| | TAAAATGGGCCGCTTCTTCAATCATACTCTAGTTCTTTTGCCCGATGGATGTGGCACTTTACTTAGA |
| | GCTTTTTATTGTATTCTAGAGCCTCGCTCTGGAAATCATTGTCCTGCTGGCAATTCCTATACTTCTT |
| | TTGCCACTTATCACACTCCTGCAACAGATTGTTCTGATGGCAATTACAATCGTAATGCCAGTCTGAA |
| | CTCTTTTAAGGAGTATTTTAATTTACGTAACTGCACCTTTATGTACACTTATAACATTACCGAAGAT |
| | GAGATTTTAGAGTGGTTTGGCATCACACAAACTGCTCAAGGTGTTCACCTCTTCTCATCTCGGTATG |
| | TTGATTTGTACGGCGGCAATATGTTTCAATTTGCCACCTTGCCTGTTTATGATACTATTAAGTATTA |
| | TTCTATCATTCCTCACAGTATTCGTTCTATCCAAAGTGATAGAAAAGCTTGGGCTGCCTTCTACGTA |
| | TATAAACTTCAACCGTTAACTTTCCTGTTGGATTTTTCTGTTGATGGTTATATACGCAGAGCTATAG |
| | ACTGTGGTTTTAATGATTTGTCACAACTCCACTGCTCATATGAATCCTTCGATGTTGAATCTGGAGT |
| | TTATTCAGTTTCGTCTTTCGAAGCAAAACCTTCTGGCTCAGTTGTGGAACAGGCTGAAGGTGTTGAA |
| | TGTGATTTTTCACCTCTTCTGTCTGGCACACCTCCTCAGGTTTATAATTTCAAGCGTTTGGTTTTTA |
| | CCAATTGCAATTATAATCTTACCAAATTGCTTTCACTTTTTTCTGTGAATGATTTTACTTGTAGTCA |
| | AATATCTCCAGCAGCAATTGCTAGCAACTGTTATTCTTCACTGATTTTGGATTATTTTTCATACCCA |
| | CTTAGTATGAAATCCGATCTCAGTGTTAGTTCTGCTGGTCCAATATCCCAGTTTAATTATAAACAGT |
| | CCTTTTCTAATCCCACATGTTTGATTTTAGCGACTGTTCCTCATAACCTTACTACTATTACTAAGCC |
| | TCTTAAGTACAGCTATATTAACAAGTGCTCTCGTCTTCTTTCTGGTGATCGTACTGAAGTACCTCAG |
| | TTAGTGAACGCTAATCAATACTCACCCTGTGTATCCATTGTCCCATCCACTGTGTGGGAAGACGGTG |
| | ATTATTATAGGAAACAACTATCTCCACTTGAAGGTGGTGGCTGGCTTGTTGCTAGTGGCTCAACTGT |
| | TGCCATGACTGAGCAATTACAGATGGGCTTTGGTATTACAGTTCAATATGGTACAGACACCAATAGT |
| | GTTTGCCCCAAGCTTGAATTTGCTAATGACACAAAAATTGCCTCTCAATTAGGCAATTGCGTGGAAT |
| | ATTCCCTCTATGGTGTTTCGGGCCGTGGTGTTTTTCAGAATTGCACAGCTGTAGGTGTTCGACAGCA |
| | GCGCTTTGTTTATGATGCGTACCAGAATTTAGTTGGCTATTATTCTGATGATGGCAACTACTACTGT |
| | TTGCGTGCTTGTGTTAGTGTTCCTGTTTCTGTCATCTATGATAAAGAAACTAAAACCCACGCTACTC |
| | TATTTGGTAGTGTTGCATGTGAACACATTTCCTCTACCATGTCTCAATACTCCCGTTCTACGCGATC |
| | AATGCTTAAACGGCGAGATTCTACATATGGTCCCCTTCAGACACCTGTTGGTTGTGTCCTAGGACTT |
| | GTTAATTCCTCTTTGTTCGTAGAGGACTGCAAGTTGCCTCTTGGTCAATCTCTCTGTGCTCTTCCTG |
| | ACACACCTAGTACTCTCACACCTCGCAGTGTGCGCTCTGTTCCAGGTGAAATGCGCTTGGCATCCAT |
| | TGCTTTTAATCATCCTATTCAGGTTGATCAACTTAATAGTAGTTATTTTAAATTAAGTATACCTACT |
| | AATTTTTCCTTTGGTGTGACTCAGGAGTATATTCAGACAACCATTCAGAAAGTTACTGTTGATTGTA |
| | AACAGTACGTTTGCAATGGTTTCCAGAAGTGTGAGCAATTACTGCGCGAGTATGGCCAGTTTTGTTC |
| | CAAAATAAACCAGGCTCTCCATGGTGCCAATTTACGCCAGGATGATTCTGTACGTAATTTGTTTGCG |
| | AGCGTGAAAAGCTCTCAATCATCTCCTATCATACCAGGTTTTGGAGGTGACTTTAATTTGACACTTC |
| | TAGAACCTGTTTCTATATCTACTGGCAGTCGTAGTGCACGTAGTGCTATTGAGGATTTGCTATTTGA |
| | CAAAGTCACTATAGCTGATCCTGGTTATATGCAAGGTTACGATGATTGTATGCAGCAAGGTCCAGCA |
| | TCAGCTCGTGATCTTATTTGTGCTCAATATGTGGCTGGTTATAAAGTATTACCTCCTCTTATGGATG |
| | TTAATATGGAAGCCGCGTACACTTCATCTTTGCTTGGCAGCATAGCAGGTGTTGGCTGGACTGCTGG |
| | CTTATCCTCCTTTGCTGCTATTCCATTTGCACAGAGTATTTTTTATAGGTTAAACGGTGTTGGCATT |
| | ACTCAACAGGTTCTTTCAGAGAACCAAAAGCTTATTGCCAATAAGTTTAATCAGGCTCTGGGAGCTA |
| | TGCAAACAGGCTTCACTACAACTAATGAAGCTTTTCGGAAGGTTCAGGATGCTGTGAACAACAATGC |
| | ACAGGCTCTATCCAAATTAGCTAGCGAGCTATCTAATACTTTTGGTGCTATTTCCGCATCTATTGGA |
| | GACATCATACAACGTCTTGATGTTCTCGAACAGGACGCCCAAATAGACAGACTTATTAATGGCCGTT |
| | TGACAACACTAAATGCTTTTGTTGCACAGCAGCTTGTTCGTTCCGAATCAGCTGCTCTTTCCGCTCA |
| | ATTGGCTAAAGATAAAGTCAATGAGTGTGTCAAGGCACAATCCAAGCGTTCTGGATTTTGCGGTCAA |
| | GGCACACATATAGTGTCCTTTGTTGTAAATGCCCCTAATGGCCTTTACTTTATGCATGTTGGTTATT |
| | ACCCTAGCAACCACATTGAGGTTGCTTCTGCTTATGGTCTTTGCGATGCAGCTAACCCTACTAATTG |
| | TATAGCCCCTGTTAATGGCTACTTTATTAAAACTAATAACACTAGTATTGTTGATGAGTGGTCATAT |
| | ACTGGCTCGTCCTTCTATGCACCTGAGCCCATCACCTCTCTTAATACTAAGTATGTTGCACCACAGG |
| | TGACATACCAAAACATTTCTACTAACCTCCCTCCTCCTCTTCTCGGCAATTCCACCGGGATTGACTT |
| | CCAAGATGAGTTGGATGAGTTTTTCAAAAATGTTAGCACCAGTATACCTAATTTTGGTTCTCTAACA |
| | CAGATTAATACTACATTACTCGATCTTACCTACGAGATGTTGTCTCTTCAACAAGTTGTTAAAGCCC |
| | TTAATGAGTCTTACATAGACCTTAAAGAGCTTGGCAATTATACTTATTACAACAAATGGCCGTGGTA |
| | CATTTGGCTTGGTTTCATTGCTGGGCTTGTTGCCTTAGCTCTATGCGTCTTCTTCATACTGTGCTGC |
| | ACTGGTTGTGGCACAAACTGTATGGGAAAACTTAAGTGTAATCGTTGTTGTGATAGATACGAGGAAT |
| | ACGACCTCGAGCCGCATAAGGTTCATGTTCACTAATTAACGAACTATCAATGAGAGTTCAAAGACCA |
| | CCCACTCTCTTGTTAGTGTTCTCACTCTCTTTTTTGGTCACTGCATTTTCAAAACCTCTCTATGTAC |
| | CTGAGCATTGTCAGAATTATTCTGGTTGCATGCTTAGGGCTTGTATTAAAACTGCCCAAGCTGATAC |
| | AGCTGGTCTTTATACAAATTTTCGAATTGACGTCCCATCTGCAGAATCAACTGGTACTCAATCAGTT |
| | TCTGTCGATCGTGAGTCTACTTCAACTCATGATGGTCTTACCGAACATGTTACTAGTGTGAATCTTT |
| | TTGACGTTGGTTACTCAGTTAATTAACGAACTCTATGGATTACGTGTCTCTGCTTAATCAAATTTGG |
| | CAGAAGTACCTTAATTCACCGTATACTACTTGTTTGTATATCCCTAAACCCACAGCTAAGTATACAC |
| | CTTTAGTTGGCACTTCATTGCACCCTGTGCTGTGGAACTGTCAGCTATCCTTTGCTGGTTATACTGA |
| | ATCTGCTGTTAATTCTACAAAAGCTTTGGCCAAACAGGACGCAGCTCAGCGAATCGCTTGGTTGCTA |
| | CATAAGGATGGAGGAATCCCTGACGGATGTTCCCTCTACCTCCGGCACTCAAGTTTATTCGCGCAAA |
| | GCGAGGAAGAGGAGTCATTCTCCAACTAAGAAACTGCGCTACGTTAAGCGTAGATTTTCTCTTCTGC |
| | GCCCTGAAGACCTTAGTGTTATTGTCCAACCAACACACTATGTCAGGGTTACATTTTCAGACCCCAA |
| | CATGTGGTATCTACGTTCGGGTCATCATTTACACTCAGTTCACAATTGGCTTAAACCTTATGGCGGC |
| | CAACCTGTTTCTGAGTACCATATTACTCTAGCTTTGCTAAATCTCACTGATGAAGATTTAGCTAGAG |
| | ATTTTTCACCCATTGCGCTCTTTTTGCGCAATGTCAGATTTGAGCTACATGAGTTCGCCTTGCTGCG |
| | CAAAACTCTTGTTCTTAATGCATCAGAGATCTACTGTGCTAACATACATAGATTTAAGCCTGTGTAT |
| | AGAGTTAACACGGCAATCCCTACTATTAAGGATTGGCTTCTCGTTCAGGGATTTTCCCTTTACCATA |
| | GTGGCCTCCCTTTACATATGTCAATCTCTAAATTGCATGCACTGGATGATGTTACTCGCAATTACAT |
| | CATTACAATGCCATGCTTTAGAACTTATCCTCAACAAATGTTTGTTACTCCTTTGGCCGTAGATGTT |
| | GTCTCCATACGGTCTTCCAATCAGGGTAATAAACAAATTGTTCATTCTTACCCCATTTTACATCATC |
| | CAGGATTTTAACGAACTATGGCTTTCTCGGCGTCTTTATTTAAACCCGTCCAGCTAGTCCCAGTTTC |
| | CCCTGCATTTCATCGCATTGAGTCTACTGACTCTATTGTTTTCACATACATTCCTGCTAGCGGCTAT |
| | GTAGCTGCTTTAGCTGTCAATGTGTGTCTCATTCCCCTATTATTACTGCTACGTCAAGATACTTGTC |
| | GTCGCAGCATTATCAGAACTATGGTTCTCTATTTCCTTGTTCTTTATAACTTTTTATTAGCCATTGT |
| | ACTAGTCAATGGTGTACATTATCCAACTGGAAGTTGCCTGATAGCCTTCTTAGTTATCCTCATAATA |
| | CTTTGGTTTGTAGATAGAATTCGTTTCTGTCTCATGCTGAATTCCTACATTCCACTGTTTGACATGC |
| | GTTCTCACTTTATTCGTGTTAGTACAGTTTCTTCTCATGGTATGGTCCCTGTCATACACACCAAACC |
| | ATTATTTATTAGAAACTTCGATCAGCGTTGCAGCTGTTCTCGTTGTTTTTATTTGCACTCTTCTACT |
| | TATATAGAGTGCACTTATATTAGCCGTTTTAGTAAGATTAGCCTAGTTTCTGTAACTGACTTCTCCT |
| | TAAACGGCAATGTTTCCACTGTTTTCGTGCCTGCAACGCGCGATTCAGTTCCTCTTCACATAATCGC |
| | CCCGAGCTCGCTTATCGTTTAAGCAGCTCTGCGCTACTATGGGTCCCGTGTAGAGGCTAATCCATTA |
| | GTCTCTCTTTGGACATATGGAAAACGAACTATGTTACCCTTTGTCCAAGAACGAATAGGGTTGTTCA |
| | TAGTAAACTTTTTCATTTTTACCGTAGTATGTGCTATAACACTCTTGGTGTGTATGGCTTTCCTTAC |
| | GGCTACTAGATTATGTGTGCAATGTATGACAGGCTTCAATACCCTGTTAGTTCAGCCCGCATTATAC |
| | TTGTATAATACTGGACGTTCAGTCTATGTAAAATTCCAGGATAGTAAACCCCCTCTACCACCTGACG |
| | AGTGGTTTTAACGAACTCCTTCATAATGTCTAATATGACGCAACTCACTGAGGCGCAGATTATTGCC |
| | ATTATTAAAGACTGGAACTTTGCATGGTCCCTGATCTTTCTCTTAATTACTATCGTACTACAGTATG |
| | GATACCCATCCCGTAGTATGACTGTCTATGTCTTTAAAATGTTTGTTTTATGGCTCCTATGGCCATC |
| | TTCCATGGCGCTATCAATATTTAGCGCCATTTATCCAATTGATCTAGCTTCCCAGATAATCTCTGGC |
| | ATTGTATCAGCTGTTTCAGCTATGATGTGGATTTCCTACTTTGTGCAGAGTATCCGGCTGTTTATGA |
| | GAACTGGATCATGGTGGTCATTCAATCCTGAGACTAATTGCCTTTTGAACGTTCCAATTGGTGGTAC |
| | AACTGTCGTACGTCCACTCGTAGAGGACTCTACCAGTGTAACTGCTGTTGTAACCAATGGTCACCTC |
| | AAAATGGCTGGCATGCATTTCGGTGCTTGTGACTACGACAGACTTCCTAATGAAGTCACCGTGGCCA |
| | AACCCAATGTGCTGATTGCTTTAAAAATGGTGAAGCGGCAAAGCTACGGAACTAATTCCGGCGTTGC |
| | CATTTACCATAGATATAAGGCAGGTAATTACAGGAGTCCGCCTATTACGGCGGATATTGAACTTGCA |
| | TTGCTTCGAGCTTAGGCTCTTTAGTAAGAGTATCTTAATTGATTTTAACGAATCTCAATTTCATTGT |
| | TATGGCATCCCCTGCTGCACCTCGTGCTGTTTCCTTTGCCGATAACAATGATATAACAAATACAAAC |
| | ATGTCTCGAGGTAGAGGACGTAATCCAAAACCACGAGCTGCACCAAATAACACTGTCTCTTGGTACA |
| | CTGGGCTTACCCAACACGGGAAAGTCCCTCTTACCTTTCCACCTGGGCAGGGTGTACCTCTTAATGC |
| | CAATTCCACCCCTGCGCAAAATGCTGGGTATTGGCGGAGACAGGACAGAAAAATTAATACCGGGAAT |
| | GGAATTAAGCAACTGGCTCCCAGGTGGTACTTCTACTACACTGGAACTGGACCCGAAGCAGCACTCC |
| | CATTCCGGGCTGTTAAGGATGGCATCGTTTGGGTCCATGAAGATGGCGCCACTGATGCTCCTTCAAC |
| | TTTTGGGACGCGGAACCCTAACAATGATTCAGCTATTGTTACACAATTCGCGCCCGGTACTAAGCTT |
| | CCTAAAAACTTCCACATTGAGGGGACTGGAGGCAATAGTCAATCATCTTCAAGAGCCTCTAGCGTAA |
| | GCAGAAACTCTTCCAGATCTAGTTCACAAGGTTCAAGATCAGGAAACTCTACCCGCGGCACTTCTCC |
| | AGGTCCATCTGGAATCGGAGCAGTAGGAGGTGATCTACTTTACCTTGATCTTCTGAACAGACTACAA |
| | GCCCTTGAGTCTGGCAAAGTAAAGCAATCGCAGCCAAAAGTAATCACTAAGAAAGATGCTGCTGCTG |
| | CTAAAAATAAGATGCGCCACAAGCGCACTTCCACCAAAAGTTTCAACATGGTGCAAGCTTTTGGTCT |
| | TCGCGGACCAGGAGACCTCCAGGGAAACTTTGGTGATCTTCAATTGAATAAACTCGGCACTGAGGAC |
| | CCACGTTGGCCCCAAATTGCTGAGCTTGCTCCTACAGCCAGTGCTTTTATGGGTATGTCGCAATTTA |
| | AACTTACCCATCAGAACAATGATGATCATGGCAACCCTGTGTACTTCCTTCGGTACAGTGGAGCCAT |
| | TAAACTTGACCCAAAGAATCCCAACTACAATAAGTGGTTGGAGCTTCTTGAGCAAAATATTGATGCC |
| | TACAAAACCTTCCCTAAGAAGGAAAAGAAACAAAAGGCACCAAAAGAAGAATCAACAGACCAAATGT |
| | CTGAACCTCCAAAGGAGCAGCGTGTGCAAGGTAGCATCACTCAGCGCACTCGCACCCGTCCAAGTGT |
| | TCAGCCTGGTCCAATGATTGATGTTAACACTGATTAGTGTCACTCAAAGTAACAAGATCGCGGCAAT |
| | CGTTTGTGTTTGGTAACCCCATCTCACCATCGCTTGTCCACTCTTGCACAGAATGGAATCATGTTGT |
| | AATTACAGTGCAATAAGGTAATTATAACCCATTTAATTGATAGCTATGCTTTATTAAAGTGTGTAGC |
| | TGTAGAGAGAATGTTAAAGACTGTCACCTCTGCGTGATTGCAAGTGAACAGTGCCCCCCGGGAAGAG |
| | CTCTACAGTGTGAAATGTAAATAAAAATAGCTATTATTCAATTAGATTAGGCTAATTAGATGATTTG |
| | CAAAAAAAAAAAA |
| 5 | GenBank Accession No. MT263402.1 (Severe acute respiratory syndrome |
| | coronavirus 2 isolate SARS-CoV-2/human/USAAVA-UW322/2020, complete |
| | genome) |
| | CCTTTAAACTTTCGATCTCTTGTAGATCTGTTCTCTAAACGAACTTTAAAATCTGTGTGGCTGTCAC |
| | TCGGCTGCATGCTTAGTGCACTCACGCAGTATAATTAATAACTAATTACTGTCGTTGACAGGACACG |
| | AGTAACTCGTCTATCTTCTGCAGGCTGCTTACGGTTTCGTCCGTGTTGCAGCCGATCATCAGCACAT |
| | CTAGGTTTTGTCCGGGTGTGACCGAAAGGTAAGATGGAGAGCCTTGTCCCTGGTTTCAACGAGAAAA |
| | CACACGTCCAACTCAGTTTGCCTGTTTTACAGGTTCGCGACGTGCTCGTACGTGGCTTTGGAGACTC |
| | CGTGGAGGAGGTCTTATCAGAGGCACGTCAACATCTTAAAGATGGCACTTGTGGCTTAGTAGAAGTT |
| | GAAAAAGGCGTTTTGCCTCAACTTGAACAGCCCTATGTGTTCATCAAACGTTCGGATGCTCGAACTG |
| | CACCTCATGGTCATGTTATGGTTGAGCTGGTAGCAGAACTCGAAGGCATTCAGTACGGTCGTAGTGG |
| | TGAGACACTTGGTGTCCTTGTCCCTCATGTGGGCGAAATACCAGTGGCTTACCGCAAGGTTCTTCTT |
| | CGTAAGAACGGTAATAAAGGAGCTGGTGGCCATAGTTACGGCGCCGATCTAAAGTCATTTGACTTAG |
| | GCGACGAGCTTGGCACTGATCCTTATGAAGATTTTCAAGAAAACTGGAACACTAAACATAGCAGTGG |
| | TGTTACCCGTGAACTCATGCGTGAGCTTAACGGAGGGGCATACACTCGCTATGTCGATAACAACTTC |
| | TGTGGCCCTGATGGCTACCCTCTTGAGTGCATTAAAGACCTTCTAGCACGTGCTGGTAAAGCTTCAT |
| | GCACTTTGTCCGAACAACTGGACTTTATTGACACTAAGAGGGGTGTATACTGCTGCCGTGAACATGA |
| | GCATGAAATTGCTTGGTACACGGAACGTTCTGAAAAGAGCTATGAATTGCAGACACCTTTTGAAATT |
| | AAATTGGCAAAGAAATTTGACACCTTCAATGGGGAATGTCCAAATTTTGTATTTCCCTTAAATTCCA |
| | TAATCAAGACTATTCAACCAAGGGTTGAAAAGAAAAAGCTTGATGGCTTTATGGGTAGAATTCGATC |
| | TGTCTATCCAGTTGCGTCACCAAATGAATGCAACCAAATGTGCCTTTCAACTCTCATGAAGTGTGAT |
| | CATTGTGGTGAAACTTCATGGCAGACGGGCGATTTTGTTAAAGCCACTTGCGAATTTTGTGGCACTG |
| | AGAATTTGACTAAAGAAGGTGCCACTACTTGTGGTTACTTACCCCAAAATGCTGTTGTTAAAATTTA |
| | TTGTCCAGCATGTCACAATTCAGAAGTAGGACCTGAGCATAGTCTTGCCGAATACCATAATGAATCT |
| | GGCTTGAAAACCATTCTTCGTAAGGGTGGTCGCACTATTGCCTTTGGAGGCTGTGTGTTCTCTTATG |
| | TTGGTTGCCATAACAAGTGTGCCTATTGGGTTCCACGTGCTAGCGCTAACATAGGTTGTAACCATAC |
| | AGGTGTTGTTGGAGAAGGTTCCGAAGGTCTTAATGACAACCTTCTTGAAATACTCCAAAAAGAGAAA |
| | GTCAACATCAATATTGTTGGTGACTTTAAACTTAATGAAGAGATCGCCATTATTTTGGCATCTTTTT |
| | CTGCTTCCACAAGTGCTTTTGTGGAAACTGTGAAAGGTTTGGATTATAAAGCATTCAAACAAATTGT |
| | TGAATCCTGTGGTAATTTTAAAGTTACAAAAGGAAAAGCTAAAAAAGGTGCCTGGAATATTGGTGAA |
| | CAGAAATCAATACTGAGTCCTCTTTATGCATTTGCATCAGAGGCTGCTCGTGTTGTACGATCAATTT |
| | TCTCCCGCACTCTTGAAACTGCTCAAAATTCTGTGCGTGTTTTACAGAAGGCCGCTATAACAATACT |
| | AGATGGAATTTCACAGTATTCACTGAGACTCATTGATGCTATGATGTTCACATCTGATTTGGCTACT |
| | AACAATCTAGTTGTAATGGCCTACATTACAGGTGGTGTTGTTCAGTTGACTTCGCAGTGGCTAACTA |
| | ACATCTTTGGCACTGTTTATGAAAAACTCAAACCCGTCCTTGATTGGCTTGAAGAGAAGTTTAAGGA |
| | AGGTGTAGAGTTTCTTAGAGACGGTTGGGAAATTGTTAAATTTATCTCAACCTGTGCTTGTGAAATT |
| | GTCGGTGGACAAATTGTCACCTGTGCAAAGGAAATTAAGGAGAGTGTTCAGACATTCTTTAAGCTTG |
| | TAAATAAATTTTTGGCTTTGTGTGCTGACTCTATCATTATTGGTGGAGCTAAACTTAAAGCCTTGAA |
| | TTTAGGTGAAACATTTGTCACGCACTCAAAGGGATTGTACAGAAAGTGTGTTAAATCCAGAGAAGAA |
| | ACTGGCCTACTCATGCCTCTAAAAGCCCCAAAAGAAATTATCTTCTTAGAGGGAGAAACACTTCCCA |
| | CAGAAGTGTTAACAGAGGAAGTTGTCTTGAAAACTGGTGATTTACAACCATTAGAACAACCTACTAG |
| | TGAAGCTGTTGAAGCTCCATTGGTTGGTACACCAGTTTGTATTAACGGGCTTATGTTGCTCGAAATC |
| | AAAGACACAGAAAAGTACTGTGCCCTTGCACCTAATATGATGGTAACAAACAATACCTTCACACTCA |
| | AAGGCGGTGCACCAACAAAGGTTACTTTTGGTGATGACACTGTGATAGAAGTGCAAGGTTACAAGAG |
| | TGTGAATATCACTTTTGAACTTGATGAAAGGATTGATAAAGTACTTAATGAGAAGTGCTCTGCCTAT |
| | ACAGTTGAACTCGGTACAGAAGTAAATGAGTTCGCCTGTGTTGTGGCAGATGCTGTCATAAAAACTT |
| | TGCAACCAGTATCTGAATTACTTACACCACTGGGCATTGATTTAGATGAGTGGAGTATGGCTACATA |
| | CTACTTATTTGATGAGTCTGGTGAGTTTAAATTGGCTTCACATATGTATTGTTCTTTTTACCCTCCA |
| | GATGAGGATGAAGAAGAAGGTGATTGTGAAGAAGAAGAGTTTGAGCCATCAACTCAATATGAGTATG |
| | GTACTGAAGATGATTACCAAGGTAAACCTTTGGAATTTGGTGCCACTTCTGCTGCTCTTCAACCTGA |
| | AGAAGAGCAAGAAGAAGATTGGTTAGATGATGATAGTCAACAAACTGTTGGTCAACAAGACGGCAGT |
| | GAGGACAATCAGACAACTACTATTCAAACAATTGTTGAGGTTCAACCTCAATTAGAGATGGAACTTA |
| | CACCAGTTGTTCAGACTATTGAAGTGAATAGTTTTAGTGGTTATTTAAAACTTACTGACAATGTATA |
| | CATTAAAAATGCAGACATTGTGGAAGAAGCTAAAAAGGTAAAACCAACAGTGGTTGTTAATGCAGCC |
| | AATGTTTACCTTAAACATGGAGGAGGTGTTGCAGGAGCCTTAAATAAGGCTACTAACAATGCCATGC |
| | AAGTTGAATCTGATGATTACATAGCTACTAATGGACCACTTAAAGTGGGTGGTAGTTGTGTTTTAAG |
| | CGGACACAATCTTGCTAAACACTGTCTTCATGTTGTCGGCCCAAATGTTAACAAAGGTGAAGACATT |
| | CAACTTCTTAAGAGTGCTTATGAAAATTTTAATCAGCACGAAGTTCTACTTGCACCATTATTATCAG |
| | CTGGTATTTTTGGTGCTGACCCTATACATTCTTTAAGAGTTTGTGTAGATACTGTTCGCACAAATGT |
| | CTACTTAGCTGTCTTTGATAAAAATCTCTATGACAAACTTGTTTCAAGCTTTTTGGAAATGAAGAGT |
| | GAAAAGCAAGTTGAACAAAAGATCGCTGAGATTCCTAAAGAGGAAGTTAAGCCATTTATAACTGAAA |
| | GTAAACCTTCAGTTGAACAGAGAAAACAAGATGATAAGAAAATCAAAGCTTGTGTTGAAGAAGTTAG |
| | AACAACTCTGGAAGAAACTAAGTTCCTCACAGAAAACTTGTTACTTTATATTGACATTAATGGCAAT |
| | CTTCATCCAGATTCTGCCACTCTTGTTAGTGACATTGACATCACTTTCTTAAAGAAAGATGCTCCAT |
| | ATATAGTGGGTGATGTTGTTCAAGAGGGTGTTTTAACTGCTGTGGTTATACCTACTAAAAAGGCTGG |
| | TGGCACTACTGAAATGCTAGCGAAAGCTTTGAGAAAAGTGCCAACAGACAATTATATAACCACTTAC |
| | CCGGGTCAGGGTTTAAATGGTTACACTGTAGAGGAGGCAAAGACAGTGCTTAAAAAGTGTAAAAGTG |
| | CCTTTTACATTCTACCATCTATTATCTCTAATGAGAAGCAAGAAATTCTTGGAACTGTTTCTTGGAA |
| | TTTGCGAGAAATGCTTGCACATGCAGAAGAAACACGCAAATTAATGCCTGTCTGTGTGGAAACTAAA |
| | GCCATAGTTTCAACTATACAGCGTAAATATAAGGGTATTAAAATACAAGAGGGTGTGGTTGATTATG |
| | GTGCTAGATTTTACTTTTACACCAGTAAAACAACTGTAGCGTCACTTATCAACACACTTAACGATCT |
| | AAATGAAACTCTTGTTACAATGCCACTTGGCTATGTAACACATGGCTTAAATTTGGAAGAAGCTGCT |
| | CGGTATATGAGATCTCTCAAAGTGCCAGCTACAGTTTCTGTTTCTTCACCTGATGCTGTTACAGCGT |
| | ATAATGGTTATCTTACTTCTTCTTCTAAAACACCTGAAGAACATTTTATTGAAACCATCTCACTTGC |
| | TGGTTCCTATAAAGATTGGTCCTATTCTGGACAATCTACACAACTAGGTATAGAATTTCTTAAGAGA |
| | GGTGATAAAAGTGTATATTACACTAGTAATCCTACCACATTCCACCTAGATGGTGAAGTTATCACCT |
| | TTGACAATCTTAAGACACTTCTTTCTTTGAGAGAAGTGAGGACTATTAAGGTGTTTACAACAGTAGA |
| | CAACATTAACCTCCACACGCAAGTTGTGGACATGTCAATGACATATGGACAACAGTTTGGTCCAACT |
| | TATTTGGATGGAGCTGATGTTACTAAAATAAAACCTCATAATTCACATGAAGGTAAAACATTTTATG |
| | TTTTACCTAATGATGACACTCTACGTGTTGAGGCTTTTGAGTACTACCACACAACTGATCCTAGTTT |
| | TCTGGGTAGGTACATGTCAGCATTAAATCACACTAAAAAGTGGAAATACCCACAAGTTAATGGTTTA |
| | ACTTCTATTAAATGGGCAGATAACAACTGTTATCTTGCCACTGCATTGTTAACACTCCAACAAATAG |
| | AGTTGAAGTTTAATCCACCTGCTCTACAAGATGCTTATTACAGAGCAAGGGCTGGTGAAGCTGCTAA |
| | CTTTTGTGCACTTATCTTAGCCTACTGTAATAAGACAGTAGGTGAGTTAGGTGATGTTAGAGAAACA |
| | ATGAGTTACTTGTTTCAACATGCCAATTTAGATTCTTGCAAAAGAGTCTTGAACGTGGTGTGTAAAA |
| | CTTGTGGACAACAGCAGACAACCCTTAAGGGTGTAGAAGCTGTTATGTACATGGGCACACTTTCTTA |
| | TGAACAATTTAAGAAAGGTGTTCAGATACCTTGTACGTGTGGTAAACAAGCTACAAAATATCTAGTA |
| | CAACAGGAGTCACCTTTTGTTATGATGTCAGCACCACCTGCTCAGTATGAACTTAAGCATGGTACAT |
| | TTACTTGTGCTAGTGAGTACACTGGTAATTACCAGTGTGGTCACTATAAACATATAACTTCTAAAGA |
| | AACTTTGTATTGCATAGACGGTGCTTTACTTACAAAGTCCTCAGAATACAAAGGTCCTATTACGGAT |
| | GTTTTCTACAAAGAAAACAGTTACACAACAACCATAAAACCAGTTACTTATAAATTGGATGGTGTTG |
| | TTTGTACAGAAATTGACCCTAAGTTGGACAATTATTATAAGAAAGACAATTCTTATTTCACAGAGCA |
| | ACCAATTGATCTTGTACCAAACCAACCATATCCAAACGCAAGCTTCGATAATTTTAAGTTTGTATGT |
| | GATAATATCAAATTTGCTGATGATTTAAACCAGTTAACTGGTTATAAGAAACCTGCTTCAAGAGAGC |
| | TTAAAGTTACATTTTTCCCTGACTTAAATGGTGATGTGGTGGCTATTGATTATAAACACTACACACC |
| | CTCTTTTAAGAAAGGAGCTAAATTGTTACATAAACCTATTGTTTGGCATGTTAACAATGCAACTAAT |
| | AAAGCCACGTATAAACCAAATACCTGGTGTATACGTTGTCTTTGGAGCACAAAACCAGTTGAAACAT |
| | CAAATTCGTTTGATGTACTGAAGTCAGAGGACGCGCAGGGAATGGATAATCTTGCCTGCGAAGATCT |
| | AAAACCAGTCTCTGAAGAAGTAGTGGAAAATCCTACCATACAGAAAGACGTTCTTGAGTGTAATGTG |
| | AAAACTACCGAAGTTGTAGGAGACATTATACTTAAACCAGCAAATAATAGTTTAAAAATTACAGAAG |
| | AGGTTGGCCACACAGATCTAATGGCTGCTTATGTAGACAATTCTAGTCTTACTATTAAGAAACCTAA |
| | TGAATTATCTAGAGTATTAGGTTTGAAAACCCTTGCTACTCATGGTTTAGCTGCTGTTAATAGTGTC |
| | CCTTGGGATACTATAGCTAATTATGCTAAGCCTTTTCTTAACAAAGTTGTTAGTACAACTACTAACA |
| | TAGTTACACGGTGTTTAAACCGTGTTTGTACTAATTATATGCCTTATTTCTTTACTTTATTGCTACA |
| | ATTGTGTACTTTTACTAGAAGTACAAATTCTAGAATTAAAGCATCTATGCCGACTACTATAGCAAAG |
| | AATACTGTTAAGAGTGTCGGTAAATTTTGTCTAGAGGCTTCATTTAATTATTTGAAGTCACCTAATT |
| | TTTCTAAACTGATAAATATTATAATTTGGTTTTTACTATTAAGTGTTTGCCTAGGTTCTTTAATCTA |
| | CTCAACCGCTGCTTTAGGTGTTTTAATGTCTAATTTAGGCATGCCTTCTTACTGTACTGGTTACAGA |
| | GAAGGCTATTTGAACTCTACTAATGTCACTATTGCAACCTACTGTACTGGTTCTATACCTTGTAGTG |
| | TTTGTCTTAGTGGTTTAGATTCTTTAGACACCTATCCTTCTTTAGAAACTATACAAATTACCATTTC |
| | ATCTTTTAAATGGGATTTAACTGCTTTTGGCTTAGTTGCAGAGTGGTTTTTGGCATATATTCTTTTC |
| | ACTAGGTTTTTCTATGTACTTGGATTGGCTGCAATCATGCAATTGTTTTTCAGCTATTTTGCAGTAC |
| | ATTTTATTAGTAATTCTTGGCTTATGTGGTTAATAATTAATCTTGTACAAATGGCCCCGATTTCAGC |
| | TATGGTTAGAATGTACATCTTCTTTGCATCATTTTATTATGTATGGAAAAGTTATGTGCATGTTGTA |
| | GACGGTTGTAATTCATCAACTTGTATGATGTGTTACAAACGTAATAGAGCAACAAGAGTCGAATGTA |
| | CAACTATTGTTAATGGTGTTAGAAGGTCCTTTTATGTCTATGCTAATGGAGGTAAAGGCTTTTGCAA |
| | ACTACACAATTGGAATTGTGTTAATTGTGATACATTCTGTGCTGGTAGTACATTTATTAGTGATGAA |
| | GTTGCGAGAGACTTGTCACTACAGTTTAAAAGACCAATAAATCCTACTGACCAGTCTTCTTACATCG |
| | TTGATAGTGTTACAGTGAAGAATGGTTCCATCCATCTTTACTTTGATAAAGCTGGTCAAAAGACTTA |
| | TGAAAGACATTCTCTCTCTCATTTTGTTAACTTAGACAACCTGAGAGCTAATAACACTAAAGGTTCA |
| | TTGCCTATTAATGTTATAGTTTTTGATGGTAAATCAAAATGTGAAGAATCATCTGCAAAATCAGCGT |
| | CTGTTTACTACAGTCAGCTTATGTGTCAACCTATACTGTTACTAGATCAGGCATTAGTGTCTGATGT |
| | TGGTGATAGTGCGGAAGTTGCAGTTAAAATGTTTGATGCTTACGTTAATACGTTTTCATCAACTTTT |
| | AACGTACCAATGGAAAAACTCAAAACACTAGTTGCAACTGCAGAAGCTGAACTTGCAAAGAATGTGT |
| | CCTTAGACAATGTCTTATCTACTTTTATTTCAGCAGCTCGGCAAGGGTTTGTTGATTCAGATGTAGA |
| | AACTAAAGATGTTGTTGAATGTCTTAAATTGTCACATCAATCTGACATAGAAGTTACTGGCGATAGT |
| | TGTAATAACTATATGCTCACCTATAACAAAGTTGAAAACATGACACCCCGTGACCTTGGTGCTTGTA |
| | TTGACTGTAGTGCGCGTCATATTAATGCGCAGGTAGCAAAAAGTCACAACATTGCTTTGATATGGAA |
| | CGTTAAAGATTTCATGTCATTGTCTGAACAACTACGAAAACAAATACGTAGTGCTGCTAAAAAGAAT |
| | AACTTACCTTTTAAGTTGACATGTGCAACTACTAGACAAGTTGTTAATGTTGTAACAACAAAGATAG |
| | CACTTAAGGGTGGTAAAATTGTTAATAATTGGTTGAAGCAGTTAATTAAAGTTACACTTGTGTTCCT |
| | TTTTGTTGCTGCTATTTTCTATTTAATAACACCTGTTCATGTCATGTCTAAACATACTGACTTTTCA |
| | AGTGAAATCATAGGATACAAGGCTATTGATGGTGGTGTCACTCGTGACATAGCATCTACAGATACTT |
| | GTTTTGCTAACAAACATGCTGATTTTGACACATGGTTTAGCCAGCGTGGTGGTAGTTATACTAATGA |
| | CAAAGCTTGCCCATTGATTGCTGCAGTCATAACAAGAGAAGTGGGTTTTGTCGTGCCTGGTTTGCCT |
| | GGCACGATATTACGCACAACTAATGGTGACTTTTTGCATTTCTTACCTAGAGTTTTTAGTGCAGTTG |
| | GTAACATCTGTTACACACCATCAAAACTTATAGAGTACACTGACTTTGCAACATCAGCTTGTGTTTT |
| | GGCTGCTGAATGTACAATTTTTAAAGATGCTTCTGGTAAGCCAGTACCATATTGTTATGATACCAAT |
| | GTACTAGAAGGTTCTGTTGCTTATGAAAGTTTACGCCCTGACACACGTTATGTGCTCATGGATGGCT |
| | CTATTATTCAATTTCCTAACACCTACCTTGAAGGTTCTGTTAGAGTGGTAACAACTTTTGATTCTGA |
| | GTACTGTAGGCACGGCACTTGTGAAAGATCAGAAGCTGGTGTTTGTGTATCTACTAGTGGTAGATGG |
| | GTACTTAACAATGATTATTACAGATCTTTACCAGGAGTTTTCTGTGGTGTAGATGCTGTAAATTTAC |
| | TTACTAATATGTTTACACCACTAATTCAACCTATTGGTGCTTTGGACATATCAGCATCTATAGTAGC |
| | TGGTGGTATTGTAGCTATCGTAGTAACATGCCTTGCCTACTATTTTATGAGGTTTAGAAGAGCTTTT |
| | GGTGAATACAGTCATGTAGTTGCCTTTAATACTTTACTATTCCTTATGTCATTCACTGTACTCTGTT |
| | TAACACCAGTTTACTCATTCTTACCTGGTGTTTATTCTGTTATTTACTTGTACTTGACATTTTATCT |
| | TACTAATGATGTTTCTTTTTTAGCACATATTCAGTGGATGGTTATGTTCACACCTTTAGTACCTTTC |
| | TGGATAACAATTGCTTATATCATTTGTATTTCCACAAAGCATTTCTATTGGTTCTTTAGTAATTACC |
| | TAAAGAGACGTGTAGTCTTTAATGGTGTTTCCTTTAGTACTTTTGAAGAAGCTGCGCTGTGCACCTT |
| | TTTGTTAAATAAAGAAATGTATCTAAAGTTGCGTAGTGATGTGCTATTACCTCTTACGCAATATAAT |
| | AGATACTTAGCTCTTTATAATAAGTACAAGTATTTTAGTGGAGCAATGGATACAACTAGCTACAGAG |
| | AAGCTGCTTGTTGTCATCTCGCAAAGGCTCTCAATGACTTCAGTAACTCAGGTTCTGATGTTCTTTA |
| | CCAACCACCACAAACCTCTATCACCTCAGCTGTTTTGCAGAGTGGTTTTAGAAAAATGGCATTCCCA |
| | TCTGGTAAAGTTGAGGGTTGTATGGTACAAGTAACTTGTGGTACAACTACACTTAACGGTCTTTGGC |
| | TTGATGACGTAGTTTACTGTCCAAGACATGTGATCTGCACCTCTGAAGACATGCTTAACCCTAATTA |
| | TGAAGATTTACTCATTCGTAAGTCTAATCATAATTTCTTGGTACAGGCTGGTAATGTTCAACTCAGG |
| | GTTATTGGACATTCTATGCAAAATTGTGTACTTAAGCTTAAGGTTGATACAGCCAATCCTAAGACAC |
| | CTAAGTATAAGTTTGTTCGCATTCAACCAGGACAGACTTTTTCAGTGTTAGCTTGTTACAATGGTTC |
| | ACCATCTGGTGTTTACCAATGTGCTATGAGGCCCAATTTCACTATTAAGGGTTCATTCCTTAATGGT |
| | TCATGTGGTAGTGTTGGTTTTAACATAGATTATGACTGTGTCTCTTTTTGTTACATGCACCATATGG |
| | AATTACCAACTGGAGTTCATGCTGGCACAGACTTAGAAGGTAACTTTTATGGACCTTTTGTTGACAG |
| | GCAAACAGCACAAGCAGCTGGTACGGACACAACTATTACAGTTAATGTTTTAGCTTGGTTGTACGCT |
| | GCTGTTATAAATGGAGACAGGTGGTTTCTCAATCGATTTACCACAACTCTTAATGACTTTAACCTTG |
| | TGGCTATGAAGTACAATTATGAACCTCTAACACAAGACCATGTTGACATACTAGGACCTCTTTCTGC |
| | TCAAACTGGAATTGCCGTTTTAGATATGTGTGCTTCATTAAAAGAATTACTGCAAAATGGTATGAAT |
| | GGACGTACCATATTGGGTAGTGCTTTATTAGAAGATGAATTTACACCTTTTGATGTTGTTAGACAAT |
| | GCTCAGGTGTTACTTTCCAAAGTGCAGTGAAAAGAACAATCAAGGGTACACACCACTGGTTGTTACT |
| | CACAATTTTGACTTCACTTTTAGTTTTAGTCCAGAGTACTCAATGGTCTTTGTTCTTTTTTTTGTAT |
| | GAAAATGCCTTTTTACCTTTTGCTATGGGTATTATTGCTATGTCTGCTTTTGCAATGATGTTTGTCA |
| | AACATAAGCATGCATTTCTCTGTTTGTTTTTGTTACCTTCTCTTGCCACTGTAGCTTATTTTAATAT |
| | GGTCTATATGCCTGCTAGTTGGGTGATGCGTATTATGACATGGTTGGATATGGTTGATACTAGTTTG |
| | TCTGGTTTTAAGCTAAAAGACTGTGTTATGTATGCATCAGCTGTAGTGTTACTAATCCTTATGACAG |
| | CAAGAACTGTGTATGATGATGGTGCTAGGAGAGTGTGGACACTTATGAATGTCTTGACACTCGTTTA |
| | TAAAGTTTATTATGGTAATGCTTTAGATCAAGCCATTTCCATGTGGGCTCTTATAATCTCTGTTACT |
| | TCTAACTACTCAGGTGTAGTTACAACTGTCATGTTTTTGGCCAGAGGTATTGTTTTTATGTGTGTTG |
| | AGTATTGCCCTATTTTCTTCATAACTGGTAATACACTTCAGTGTATAATGCTAGTTTATTGTTTCTT |
| | AGGCTATTTTTGTACTTGTTACTTTGGCCTCTTTTGTTTACTCAACCGCTACTTTAGACTGACTCTT |
| | GGTGTTTATGATTACTTAGTTTCTACACAGGAGTTTAGATATATGAATTCACAGGGACTACTCCCAC |
| | CCAAGAATAGCATAGATGCCTTCAAACTCAACATTAAATTGTTGGGTGTTGGTGGCAAACCTTGTAT |
| | CAAAGTAGCCACTGTACAGTCTAAAATGTCAGATGTAAAGTGCACATCAGTAGTCTTACTCTCAGTT |
| | TTGCAACAACTCAGAGTAGAATCATCATCTAAATTGTGGGCTCAATGTGTCCAGTTACACAATGACA |
| | TTCTCTTAGCTAAAGATACTACTGAAGCCTTTGAAAAAATGGTTTCACTACTTTCTGTTTTGCTTTC |
| | CATGCAGGGTGCTGTAGACATAAACAAGCTTTGTGAAGAAATGCTGGACAACAGGGCAACCTTACAA |
| | GCTATAGCCTCAGAGTTTAGTTCCCTTCCATCATATGCAGCTTTTGCTACTGCTCAAGAAGCTTATG |
| | AGCAGGCTGTTGCTAATGGTGATTCTGAAGTTGTTCTTAAAAAGTTGAAGAAGTCTTTGAATGTGGC |
| | TAAATCTGAATTTGACCGTGATGCAGCCATGCAACGTAAGTTGGAAAAGATGGCTGATCAAGCTATG |
| | ACCCAAATGTATAAACAGGCTAGATCTGAGGACAAGAGGGCAAAAGTTACTAGTGCTATGCAGACAA |
| | TGCTTTTCACTATGCTTAGAAAGTTGGATAATGATGCACTCAACAACATTATCAACAATGCAAGAGA |
| | TGGTTGTGTTCCCTTGAACATAATACCTCTTACAACAGCAGCCAAACTAATGGTTGTCATACCAGAC |
| | TATAACACATATAAAAATACGTGTGATGGTACAACATTTACTTATGCATCAGCATTGTGGGAAATCC |
| | AACAGGTTGTAGATGCAGATAGTAAAATTGTTCAACTTAGTGAAATTAGTATGGACAATTCACCTAA |
| | TTTAGCATGGCCTCTTATTGTAACAGCTTTAAGGGCCAATTCTGCTGTCAAATTACAGAATAATGAG |
| | CTTAGTCCTGTTGCACTACGACAGATGTCTTGTGCTGCCGGTACTACACAAACTGCTTGCACTGATG |
| | ACAATGCGTTAGCTTACTACAACACAACAAAGGGAGGTAGGTTTGTACTTGCACTGTTATCCGATTT |
| | ACAGGATTTGAAATGGGCTAGATTCCCTAAGAGTGATGGAACTGGTACTATCTATACAGAACTGGAA |
| | CCACCTTGTAGGTTTGTTACAGACACACCTAAAGGTCCTAAAGTGAAGTATTTATACTTTATTAAAG |
| | GATTAAACAACCTAAATAGAGGTATGGTACTTGGTAGTTTAGCTGCCACAGTACGTCTACAAGCTGG |
| | TAATGCAACAGAAGTGCCTGCCAATTCAACTGTATTATCTTTCTGTGCTTTTGCTGTAGATGCTGCT |
| | AAAGCTTACAAAGATTATCTAGCTAGTGGGGGACAACCAATCACTAATTGTGTTAAGATGTTGTGTA |
| | CACACACTGGTACTGGTCAGGCAATAACAGTTACACCGGAAGCCAATATGGATCAAGAATCCTTTGG |
| | TGGTGCATCGTGTTGTCTGTACTGCCGTTGCCACATAGATCATCCAAATCCTAAAGGATTTTGTGAC |
| | TTAAAAGGTAAGTATGTACAAATACCTACAACTTGTGCTAATGACCCTGTGGGTTTTACACTTAAAA |
| | ACACAGTCTGTACCGTCTGCGGTATGTGGAAAGGTTATGGCTGTAGTTGTGATCAACTCCGCGAACC |
| | CATGCTTCAGTCAGCTGATGCACAATCGTTTTTAAACGGGTTTGCGGTGTAAGTGCAGCCCGTCTTA |
| | CACCGTGCGGCACAGGCACTAGTACTGATGTCGTATACAGGGCTTTTGACATCTACAATGATAAAGT |
| | AGCTGGTTTTGCTAAATTCCTAAAAACTAATTGTTGTCGCTTCCAAGAAAAGGACGAAGATGACAAT |
| | TTAATTGATTCTTACTTTGTAGTTAAGAGACACACTTTCTCTAACTACCAACATGAAGAAACAATTT |
| | ATAATTTACTTAAGGATTGTCCAGCTGTTGCTAAACATGACTTCTTTAAGTTTAGAATAGACGGTGA |
| | CATGGTACCACATATATCACGTCAACGTCTTACTAAATACACAATGGCAGACCTCGTCTATGCTTTA |
| | AGGCATTTTGATGAAGGTAATTGTGACACATTAAAAGAAATACTTGTCACATACAATTGTTGTGATG |
| | ATGATTATTTCAATAAAAAGGACTGGTATGATTTTGTAGAAAACCCAGATATATTACGCGTATACGC |
| | CAACTTAGGTGAACGTGTACGCCAAGCTTTGTTAAAAACAGTACAATTCTGTGATGCCATGCGAAAT |
| | GCTGGTATTGTTGGTGTACTGACATTAGATAATCAAGATCTCAATGGTAACTGGTATGATTTCGGTG |
| | ATTTCATACAAACCACGCCAGGTAGTGGAGTTCCTGTTGTAGATTCTTATTATTCATTGTTAATGCC |
| | TATATTAACCTTGACCAGGGCTTTAACTGCAGAGTCACATGTTGACACTGACTTAACAAAGCCTTAC |
| | ATTAAGTGGGATTTGTTAAAATATGACTTCACGGAAGAGAGGTTAAAACTCTTTGACCGTTATTTTA |
| | AATATTGGGATCAGACATACCACCCAAATTGTGTTAACTGTTTGGATGACAGATGCATTCTGCATTG |
| | TGCAAACTTTAATGTTTTATTCTCTACAGTGTTCCCACTTACAAGTTTTGGACCACTAGTGAGAAAA |
| | ATATTTGTTGATGGTGTTCCATTTGTAGTTTCAACTGGATACCACTTCAGAGAGCTAGGTGTTGTAC |
| | ATAATCAGGATGTAAACTTACATAGCTCTAGACTTAGTTTTAAGGAATTACTTGTGTATGCTGCTGA |
| | CCCTGCTATGCACGCTGCTTCTGGTAATCTATTACTAGATAAACGCACTACGTGCTTTTCAGTAGCT |
| | GCACTTACTAACAATGTTGCTTTTCAAACTGTCAAACCCGGTAATTTTAACAAAGACTTCTATGACT |
| | TTGCTGTGTCTAAGGGTTTCTTTAAGGAAGGAAGTTCTGTTGAATTAAAACACTTCTTCTTTGCTCA |
| | GGATGGTAATGCTGCTATCAGCGATTATGACTACTATCGTTATAATCTACCAACAATGTGTGATATC |
| | AGACAACTACTATTTGTAGTTGAAGTTGTTGATAAGTACTTTGATTGTTACGATGGTGGCTGTATTA |
| | ATGCTAACCAAGTCATCGTCAACAACCTAGACAAATCAGCTGGTTTTCCATTTAATAAATGGGGTAA |
| | GGCTAGACTTTATTATGATTCAATGAGTTATGAGGATCAAGATGCACTTTTCGCATATACAAAACGT |
| | AATGTCATCCCTACTATAACTCAAATGAATCTTAAGTATGCCATTAGTGCAAAGAATAGAGCTCGCA |
| | CCGTAGCTGGTGTCTCTATCTGTAGTACTATGACCAATAGACAGTTTCATCAAAAATTATTGAAATC |
| | AATAGCCGCCACTAGAGGAGCTACTGTAGTAATTGGAACAAGCAAATTCTATGGTGGTTGGCACAAC |
| | ATGTTAAAAACTGTTTATAGTGATGTAGAAAACCCTCACCTTATGGGTTGGGATTATCCTAAATGTG |
| | ATAGAGCCATGCCTAACATGCTTAGAATTATGGCCTCACTTGTTCTTGCTCGCAAACATACAACGTG |
| | TTGTAGCTTGTCACACCGTTTCTATAGATTAGCTAATGAGTGTGCTCAAGTATTGAGTGAAATGGTC |
| | ATGTGTGGCGGTTCACTATATGTTAAACCAGGTGGAACCTCATCAGGAGATGCCACAACTGCTTATG |
| | CTAATAGTGTTTTTAACATTTGTCAAGCTGTCACGGCCAATGTTAATGCACTTTTATCTACTGATGG |
| | TAACAAAATTGCCGATAAGTATGTCCGCAATTTACAACACAGACTTTATGAGTGTCTCTATAGAAAT |
| | AGAGATGTTGACACAGACTTTGTGAATGAGTTTTACGCATATTTGCGTAAACATTTCTCAATGATGA |
| | TACTCTCTGACGATGCTGTTGTGTGTTTCAATAGCACTTATGCATCTCAAGGTCTAGTGGCTAGCAT |
| | AAAGAACTTTAAGTCAGTTCTTTATTATCAAAACAATGTTTTTATGTCTGAAGCAAAATGTTGGACT |
| | GAGACTGACCTTACTAAAGGACCTCATGAATTTTGCTCTCAACATACAATGCTAGTTAAACAGGGTG |
| | ATGATTATGTGTACCTTCCTTACCCAGATCCATCAAGAATCCTAGGGGCCGGCTGTTTTGTAGATGA |
| | TATCGTAAAAACAGATGGTACACTTATGATTGAACGGTTCGTGTCTTTAGCTATAGATGCTTACCCA |
| | CTTACTAAACATCCTAATCAGGAGTATGCTGATGTCTTTCATTTGTACTTACAATACATAAGAAAGC |
| | TACATGATGAGTTAACAGGACACATGTTAGACATGTATTCTGTTATGCTTACTAATGATAACACTTC |
| | AAGGTATTGGGAACCTGAGTTTTATGAGGCTATGTACACACCGCATACAGTCTTACAGGCTGTTGGG |
| | GCTTGTGTTCTTTGCAATTCACAGACTTCATTAAGATGTGGTGCTTGCATACGTAGACCATTCTTAT |
| | GTTGTAAATGCTGTTAGGAGCATGTCATATCAACATCACATAAATTAGTCTTGTCTGTTAATCCGTA |
| | TGTTTGCAATGCTCCAGGTTGTGATGTCACAGATGTGACTCAACTTTACTTAGGAGGTATGAGCTAT |
| | TATTGTAAATCACATAAACCACCCATTAGTTTTCCATTGTGTGCTAATGGACAAGTTTTTGGTTTAT |
| | ATAAAAATACATGTGTTGGTAGCGATAATGTTACTGACTTTAATGCAATTGCAACATGTGACTGGAC |
| | AAATGCTGGTGATTACATTTTAGCTAACACCTGTACTGAAAGACTCAAGCTTTTTGCAGCAGAAACG |
| | CTCAAAGCTACTGAGGAGACATTTAAACTGTCTTATGGTATTGCTACTGTACGTGAAGTGCTGTCTG |
| | ACAGAGAATTACATCTTTCATGGGAAGTTGGTAAACCTAGACCACCACTTAACCGAAATTATGTCTT |
| | TACTGGTTATCGTGTAACTAAAAACAGTAAAGTACAAATAGGAGAGTACACCTTTGAAAAAGGTGAC |
| | TATGGTGATGCTGTTGTTTACCGAGGTACAACAACTTACAAATTAAATGTTGGTGATTATTTTGTGC |
| | TGACATCACATACAGTAATGCCATTAAGTGCACCTACACTAGTGCCACAAGAGCACTATGTTAGAAT |
| | TACTGGCTTATACCCAACACTCAATATCTCAGATGAGTTTTCTAGCAATGTTGCAAATTATCAAAAG |
| | GTTGGTATGCAAAAGTATTCTACACTCCAGGGACCACCTGGTACTGGTAAGAGTCATTTTGCTATTG |
| | GCCTAGCTCTCTACTACCCTTCTGCTCGCATAGTGTATACAGCTTGCTCTCATGCCGCTGTTGATGC |
| | ACTATGTGAGAAGGCATTAAAATATTTGCCTATAGATAAATGTAGTAGAATTATACCTGCACGTGCT |
| | CGTGTAGAGTGTTTTGATAAATTCAAAGTGAATTCAACATTAGAACAGTATGTCTTTTGTACTGTAA |
| | ATGCATTGCCTGAGACGACAGCAGATATAGTTGTCTTTGATGAAATTTCAATGGCCACAAATTATGA |
| | TTTGAGTGTTGTCAATGCCAGATTACGTGCTAAGCACTATGTGTACATTGGCGACCCTGCTCAATTA |
| | CCTGCACCACGCACATTGCTAACTAAGGGCACACTAGAACCAGAATATTTCAATTCAGTGTGTAGAC |
| | TTATGAAAACTATAGGTCCAGACATGTTCCTCGGAACTTGTCGGCGTTGTCCTGCTGAAATTGTTGA |
| | CACTGTGAGTGCTTTGGTTTATGATAATAAGCTTAAAGCACATAAAGACAAATCAGCTCAATGCTTT |
| | AAAATGTTTTATAAGGGTGTTATCACGCATGATGTTTCATCTGCAATTAACAGGCCACAAATAGGCG |
| | TGGTAAGAGAATTCCTTACACGTAACCCTGCTTGGAGAAAAGCTGTCTTTATTTCACCTTATAATTC |
| | ACAGAATGCTGTAGCCTCAAAGATTTTGGGACTACCAACTCAAACTGTTGATTCATCACAGGGCTCA |
| | GAATATGACTATGTCATATTCACTCAAACCACTGAAACAGCTCACTCTTGTAATGTAAACAGATTTA |
| | ATGTTGCTATTACCAGAGCAAAAGTAGGCATACTTTGCATAATGTCTGATAGAGACCTTTATGACAA |
| | GTTGCAATTTACAAGTCTTGAAATTCCACGTAGGAATGTGGCAACTTTACAAGCTGAAAATGTAACA |
| | GGACTCTTTAAAGATTGTAGTAAGGTAATCACTGGGTTACATCCTACACAGGCACCTACACACCTCA |
| | GTGTTGACACTAAATTCAAAACTGAAGGTTTATGTGTTGACATACCTGGCATACCTAAGGACATGAC |
| | CTATAGAAGACTCATCTCTATGATGGGTTTTAAAATGAATTATCAAGTTAATGGTTACCCTAACATG |
| | TTTATCACCCGCGAAGAAGCTATAAGACATGTACGTGCATGGATTGGCTTCGATGTCGAGGGGTGTC |
| | ATGCTACTAGAGAAGCTGTTGGTACCAATTTACCTTTACAGCTAGGTTTTTCTACAGGTGTTAACCT |
| | AGTTGCTGTACCTACAGGTTATGTTGATACACCTAATAATACAGATTTTTCCAGAGTTAGTGCTAAA |
| | CCACCGCCTGGAGATCAATTTAAACACCTCATACCACTTATGTACAAAGGACTTCCTTGGAATGTAG |
| | TGCGTATAAAGATTGTACAAATGTTAAGTGACACACTTAAAAATCTCTCTGACAGAGTCGTATTTGT |
| | CTTATGGGCACATGGCTTTGAGTTGACATCTATGAAGTATTTTGTGAAAATAGGACCTGAGCGCACC |
| | TGTTGTCTATGTGATAGACGTGCCACATGCTTTTCCACTGCTTCAGACACTTATGCCTGTTGGCATC |
| | ATTCTATTGGATTTGATTACGTCTATAATCCGTTTATGATTGATGTTCAACAATGGGGTTTTACAGG |
| | TAACCTACAAAGCAACCATGATCTGTATTGTCAAGTCCATGGTAATGCACATGTAGCTAGTTGTGAT |
| | GCAATCATGACTAGGTGTCTAGCTGTCCACGAGTGCTTTGTTAAGCGTGTTGACTGGACTATTGAAT |
| | ATCCTATAATTGGTGATGAACTGAAGATTAATGCGGCTTGTAGAAAGGTTCAACACATGGTTGTTAA |
| | AGCTGCATTATTAGCAGACAAATTCCCAGTTCTTCACGACATTGGTAACCCTAAAGCTATTAAGTGT |
| | GTACCTCAAGCTGATGTAGAATGGAAGTTCTATGATGCACAGCCTTGTAGTGACAAAGCTTATAAAA |
| | TAGAAGAATTATTCTATTCTTATGCCACACATTCTGACAAATTCACAGATGGTGTATGCCTATTTTG |
| | GAATTGCAATGTCGATAGATATCCTGCTAATTCCATTGTTTGTAGATTTGACACTAGAGTGCTATCT |
| | AACCTTAACTTGCCTGGTTGTGATGGTGGCAGTTTGTATGTAAATAAACATGCATTCCACACACCAG |
| | CTTTTGATAAAAGTGCTTTTGTTAATTTAAAACAATTACCATTTTTCTATTACTCTGACAGTCCATG |
| | TGAGTCTCATGGAAAACAAGTAGTGTCAGATATAGATTATGTACCACTAAAGTCTGCTACGTGTATA |
| | ACACGTTGCAATTTAGGTGGTGCTGTCTGTAGACATCATGCTAATGAGTACAGATTGTATCTCGATG |
| | CTTATAACATGATGATCTCAGCTGGCTTTAGCTTGTGGGTTTACAAACAATTTGATACTTATAACCT |
| | CTGGAACACTTTTACAAGACTTCAGAGTTTAGAAAATGTGGCTTTTAATGTTGTAAATAAGGGACAC |
| | TTTGATGGACAACAGGGTGAAGTACCAGTTTCTATCATTAATAACACTGTTTACACAAAAGTTGATG |
| | GTGTTGATGTAGAATTGTTTGAAAATAAAACAACATTACCTGTTAATGTAGCATTTGAGCTTTGGGC |
| | TAAGCGCAACATTAAACCAGTACCAGAGGTGAAAATACTCAATAATTTGGGTGTGGACATTGCTGCT |
| | AATACTGTGATCTGGGACTACAAAAGAGATGCTCCAGCACATATATCTACTATTGGTGTTTGTTCTA |
| | TGACTGACATAGCCAAGAAACCAACTGAAACGATTTGTGCACCACTCACTGTCTTTTTTGATGGTAG |
| | AGTTGATGGTCAAGTAGACTTATTTAGAAATGCCCGTAATGGTGTTCTTATTACAGAAGGTAGTGTT |
| | AAAGGTTTACAACCATCTGTAGGTCCCAAACAAGCTAGTCTTAATGGAGTCACATTAATTGGAGAAG |
| | CCGTAAAAACACAGTTCAATTATTATAAGAAAGTTGATGGTGTTGTCCAACAATTACCTGAAACTTA |
| | CTTTACTCAGAGTAGAAATTTACAAGAATTTAAACCCAGGAGTCAAATGGAAATTGATTTCTTAGAA |
| | TTAGCTATGGATGAATTCATTGAACGGTATAAATTAGAAGGCTATGCCTTCGAACATATCGTTTATG |
| | GAGATTTTAGTCATAGTCAGTTAGGTGGTTTACATCTACTGATTGGACTAGCTAAACGTTTTAAGGA |
| | ATCACCTTTTGAATTAGAAGATTTTATTCCTATGGACAGTACAGTTAAAAACTATTTCATAACAGAT |
| | GCGCAAACAGGTTCATCTAAGTGTGTGTGTTCTGTTATTGATTTATTACTTGATGATTTTGTTGAAA |
| | TAATAAAATCCCAAGATTTATCTGTAGTTTCTAAGGTTGTCAAAGTGACTATTGACTATACAGAAAT |
| | TTCATTTATGCTTTGGTGTAAAGATGGCCATGTAGAAACATTTTACCCAAAATTACAATCTAGTCAA |
| | GCGTGGCAACCGGGTGTTGCTATGCCTAATCTTTACAAAATGCAAAGAATGCTATTAGAAAAGTGTG |
| | ACCTTCAAAATTATGGTGATAGTGCAACATTACCTAAAGGCATAATGATGAATGTCGCAAAATATAC |
| | TCAACTGTGTCAATATTTAAACACATTAACATTAGCTGTACCCTATAATATGAGAGTTATACATTTT |
| | GGTGCTGGTTCTGATAAAGGAGTTGCACCAGGTACAGCTGTTTTAAGACAGTGGTTGCCTACGGGTA |
| | CGCTGCTTGTCGATTCAGATCTTAATGACTTTGTCTCTGATGCAGATTCAACTTTGATTGGTGATTG |
| | TGCAACTGTACATACAGCTAATAAATGGGATCTCATTATTAGTGATATGTACGACCCTAAGACTAAA |
| | AATGTTACAAAAGAAAATGACTCTAAAGAGGGTTTTTTCACTTACATTTGTGGGTTTATACAACAAA |
| | AGCTAGCTCTTGGAGGTTCCGTGGCTATAAAGATAACAGAACATTCTTGGAATGCTGATCTTTATAA |
| | GCTCATGGGACACTTCGCATGGTGGACAGCCTTTGTTACTAATGTGAATGCGTCATCATCTGAAGCA |
| | TTTTTAATTGGATGTAATTATCTTGGCAAACCACGCGAACAAATAGATGGTTATGTCATGCATGCAA |
| | ATTACATATTTTGGAGGAATACAAATCCAATTCAGTTGTCTTCCTATTCTTTATTTGACATGAGTAA |
| | ATTTCCCCTTAAATTAAGGGGTACTGCTGTTATGTCTTTAAAAGAAGGTCAAATCAATGATATGATT |
| | TTATCTCTTCTTAGTAAAGGTAGACTTATAATTAGAGAAAACAACAGAGTTGTTATTTCTAGTGATG |
| | TTCTTGTTAACAACTAAACGAACAATGTTTGTTTTTCTTGTTTTATTGCCACTAGTCTCTAGTCAGT |
| | GTGTTAATCTTACAACCAGAACTCAATTACCCCCTGCATACACTAATTCTTTCACACGTGGTGTTTA |
| | TTACCCTGACAAAGTTTTCAGATCCTCAGTTTTACATTCAACTCAGGACTTGTTCTTACCTTTCTTT |
| | TCCAATGTTACTTGGTTCCATGCTATACATGTCTCTGGGACCAATGGTACTAAGAGGTTTGATAACC |
| | CTGTCCTACCATTTAATGATGGTGTTTATTTTGCTTCCACTGAGAAGTCTAACATAATAAGAGGCTG |
| | GATTTTTGGTACTACTTTAGATTCGAAGACCCAGTCCCTACTTATTGTTAATAACGCTACTAATGTT |
| | GTTATTAAAGTCTGTGAATTTCAATTTTGTAATGATCCATTTTTGGGTGTTTATTACCACAAAAACA |
| | ACAAAAGTTGGATGGAAAGTGAGTTCAGAGTTTATTCTAGTGCGAATAATTGCACTTTTGAATATGT |
| | CTCTCAGCCTTTTCTTATGGACCTTGAAGGAAAACAGGGTAATTTCAAAAATCTTAGGGAATTTGTG |
| | TTTAAGAATATTGATGGTTATTTTAAAATATATTCTAAGCACACGCCTATTAATTTAGTGCGTGATC |
| | TCCCTCAGGGTTTTTCGGCTTTAGAACCATTGGTAGATTTGCCAATAGGTATTAACATCACTAGGTT |
| | TCAAACTTTACTTGCTTTACATAGAAGTTATTTGACTCCTGGTGATTCTTCTTCAGGTTGGACAGCT |
| | GGTGCTGCAGCTTATTATGTGGGTTATCTTCAACCTAGGACTTTTCTATTAAAATATAATGAAAATG |
| | GAACCATTACAGATGCTGTAGACTGTGCACTTGACCCTCTCTCAGAAACAAAGTGTACGTTGAAATC |
| | CTTCACTGTAGAAAAAGGAATCTATCAAACTTCTAACTTTAGAGTCCAACCAACAGAATCTATTGTT |
| | AGATTTCCTAATATTACAAACTTGTGCCCTTTTGGTGAAGTTTTTAACGCCACCAGATTTGCATCTG |
| | TTTATGCTTGGAACAGGAAGAGAATCAGCAACTGTGTTGCTGATTATTCTGTCCTATATAATTCCGC |
| | ATCATTTTCCACTTTTAAGTGTTATGGAGTGTCTCCTACTAAATTAAATGATCTCTGCTTTACTAAT |
| | GTCTATGCAGATTCATTTGTAATTAGAGGTGATGAAGTCAGACAAATCGCTCCAGGGCAAACTGGAA |
| | AGATTGCTGATTATAATTATAAATTACCAGATGATTTTACAGGCTGCGTTATAGCTTGGAATTCTAA |
| | CAATCTTGATTCTAAGGTTGGTGGTAATTATAATTACCTGTATAGATTGTTTAGGAAGTCTAATCTC |
| | AAACCTTTTGAGAGAGATATTTCAACTGAAATCTATCAGGCCGGTAGCACACCTTGTAATGGTGTTG |
| | AAGGTTTTAATTGTTACTTTCCTTTACAATCATATGGTTTCCAACCCACTAATGGTGTTGGTTACCA |
| | ACCATACAGAGTAGTAGTACTTTCTTTTGAACTTCTACATGCACCAGCAACTGTTTGTGGACCTAAA |
| | AAGTCTACTAATTTGGTTAAAAACAAATGTGTCAATTTCAACTTCAATGGTTTAACAGGCACAGGTG |
| | TTCTTACTGAGTCTAACAAAAAGTTTCTGCCTTTCCAACAATTTGGCAGAGACATTGCTGACACTAC |
| | TGATGCTGTCCGTGATCCACAGACACTTGAGATTCTTGACATTACACCATGTTCTTTTGGTGGTGTC |
| | AGTGTTATAACACCAGGAACAAATACTTCTAACCAGGTTGCTGTTCTTTATCAGGGTGTTAACTGCA |
| | CAGAAGTCCCTGTTGCTATTCATGCAGATCAACTTACTCCTACTTGGCGTGTTTATTCTACAGGTTC |
| | TAATGTTTTTCAAACACGTGCAGGCTGTTTAATAGGGGCTGAACATGTCAACAACTCATATGAGTGT |
| | GACATACCCATTGGTGCAGGTATATGCGCTAGTTATCAGACTCAGACTAATTCTCCTCGGCGGGCAC |
| | GTAGTGTAGCTAGTCAATCCATCATTGCCTACACTATGTCACTTGGTGCAGAAAATTCAGTTGCTTA |
| | CTCTAATAACTCTATTGCCATACCCACAAATTTTACTATTAGTGTTACCACAGAAATTCTACCAGTG |
| | TCTATGACCAAGACATCAGTAGATTGTACAATGTACATTTGTGGTGATTCAACTGAATGCAGCAATC |
| | TTTTGTTGCAATATGGCAGTTTTTGTACACAATTAAACCGTGCTTTAACTGGAATAGCTGTTGAACA |
| | AGACAAAAACACCCAAGAAGTTTTTGCACAAGTCAAACAAATTTACAAAACACCACCAATTAAAGAT |
| | TTTGGTGGTTTTAATTTTTCACAAATATTAGCAGATCCATCAAAACCAAGCAAGAGGTCATTTATTG |
| | AAGATCTACTTTTCAACAAAGTGACACTTGCAGATGCTGGCTTCATCAAACAATATGGTGATTGCCT |
| | TGGTGATATTGCTGCTAGAGACCTCATTTGTGCACAAAAGTTTAACGGCCTTACTGTTTTGCCACCT |
| | TTGCTCACAGATGAAATGATTGCTCAATACACTTCTGCACTGTTAGCGGGTACAATCACTTCTGGTT |
| | GGACCTTTGGTGCAGGTGCTGCATTACAAATACCATTTGCTATGCAAATGGCTTATAGGTTTAATGG |
| | TATTGGAGTTACACAGAATGTTCTCTATGAGAACCAAAAATTGATTGCCAACCAATTTAATAGTGCT |
| | ATTGGCAAAATTCAAGACTCACTTTCTTCCACAGCAAGTGCACTTGGAAAACTTCAAGATGTGGTCA |
| | ACCAAAATGCACAAGCTTTAAACACGCTTGTTAAACAACTTAGCTCCAATTTTGGTGCAATTTCAAG |
| | TGTTTTAAATGATATCCTTTCACGTCTTGACAAAGTTGAGGCTGAAGTGCAAATTGATAGGTTGATC |
| | ACAGGCAGACTTCAAAGTTTGCAGACATATGTGACTCAACAATTAATTAGAGCTGCAGAAATCAGAG |
| | CTTCTGCTAATCTTGCTGCTACTAAAATGTCAGAGTGTGTACTTGGACAATCAAAAAGAGTTGATTT |
| | TTGTGGAAAGGGCTATCATCTTATGTCCTTCCCTCAGTCAGCACCTCATGGTGTAGTCTTCTTGCAT |
| | GTGACTTATGTCCCTGCACAAGAAAAGAACTTCACAACTGCTCCTGCCATTTGTCATGATGGAAAAG |
| | CACACTTTCCTCGTGAAGGTGTCTTTGTTTCAAATGGCACACACTGGTTTGTAACACAAAGGAATTT |
| | TTATGAACCACAAATCATTACTACAGACAACACATTTGTGTCTGGTAACTGTGATGTTGTAATAGGA |
| | ATTGTCAACAACACAGTTTATGATCCTTTGCAACCTGAATTAGACTCATTCAAGGAGGAGTTAGATA |
| | AATATTTTAAGAATCATACATCACCAGATGTTGATTTAGGTGACATCTCTGGCATTAATGCTTCAGT |
| | TGTAAACATTCAAAAAGAAATTGACCGCCTCAATGAGGTTGCCAAGAATTTAAATGAATCTCTCATC |
| | GATCTCCAAGAACTTGGAAAGTATGAGCAGTATATAAAATGGCCATGGTACATTTGGCTAGGTTTTA |
| | TAGCTGGCTTGATTGCCATAGTAATGGTGACAATTATGCTTTGCTGTATGACCAGTTGCTGTAGTTG |
| | TCTCAAGGGCTGTTGTTCTTGTGGATCCTGCTGCAAATTTGATGAAGACGACTCTGAGCCAGTGCTC |
| | AAAGGAGTCAAATTACATTACACATAAACGAACTTATGGATTTGTTTATGAGAATCTTCACAATTGG |
| | AACTGTAACTTTGAAGCAAGGTGAAATCAAGGATGCTACTCCTTCAGATTTTGTTCGCGCTACTGCA |
| | ACGATACCGATACAAGCCTCACTCCCTTTCGGATGGCTTATTGTTGGCGTTGCACTTCTTGCTGTTT |
| | TTCAGAGCGCTTCCAAAATCATAACCCTCAAAAAGAGATGGCAACTAGCACTCTCCAAGGGTGTTCA |
| | CTTTGTTTGCAACTTGCTGTTGTTGTTTGTAACAGTTTACTCACACCTTTTGCTCGTTGCTGCTGGC |
| | CTTGAAGCCCCTTTTCTCTATCTTTATGCTTTAGTCTACTTCTTGCAGAGTATAAACTTTGTAAGAA |
| | TAATAATGAGGCTTTGGCTTTGCTGGAAATGCCGTTCCAAAAACCCATTACTTTATGATGCCAACTA |
| | TTTTCTTTGCTGGCATACTAATTGTTACGACTATTGTATACCTTACAATAGTGTAACTTCTTCAATT |
| | GTCATTACTTCAGGTGATGGCACAACAAGTCCTATTTCTGAACATGACTACCAGATTGGTGGTTATA |
| | CTGAAAAATGGGAATCTGGAGTAAAAGACTGTGTTGTATTACACAGTTACTTCACTTCAGACTATTA |
| | CCAGCTGTACTCAACTCAATTGAGTACAGACACTGGTGTTGAACATGTTACCTTCTTCATCTACAAT |
| | AAAATTGTTGATGAGCCTGAAGAACATGTCCAAATTCACACAATCGACGGTTCATCCGGAGTTGTTA |
| | ATCCAGTAATGGAACCAATTTATGATGAACCGACGACGACTACTAGCGTGCCTTTGTAAGCACAAGC |
| | TGATGAGTACGAACTTATGTACTCATTCGTTTCGGAAGAGACAGGTACGTTAATAGTTAATAGCGTA |
| | CTTCTTTTTCTTGCTTTCGTGGTATTCTTGCTAGTTACACTAGCCATCCTTACTGCGCTTCGATTGT |
| | GTGCGTACTGCTGCAATATTGTTAACGTGAGTCTTGTAAAACCTTCTTTTTACGTTTACTCTCGTGT |
| | TAAAAATCTGAATTCTTCTAGAGTTCCTGATCTTCTGGTCTAAACGAACTAAATATTATATTAGTTT |
| | TTCTGTTTGGAACTTTAATTTTAGCCATGGCAGATTCCAACGGTACTATTACCGTTGAAGAGCTTAA |
| | AAAGCTCCTTGAACAATGGAACCTAGTAATAGGTTTCCTATTCCTTACATGGATTTGTCTTCTACAA |
| | TTTGCCTATGCCAACAGGAATAGGTTTTTGTATATAATTAAGTTAATTTTCCTCTGGCTGTTATGGC |
| | CAGTAACTTTAGCTTGTTTTGTGCTTGCTGCTGTTTACAGAATAAATTGGATCACCGGTGGAATTGC |
| | TATCGCAATGGCTTGTCTTGTAGGCTTGATGTGGCTCAGCTACTTCATTGCTTCTTTCAGACTGTTT |
| | GCGCGTACGCGTTCCATGTGGTCATTCAATCCAGAAACTAACATTCTTCTCAACGTGCCACTCCATG |
| | GCACTATTCTGACCAGACCGCTTCTAGAAAGTGAACTCGTAATCGGAGCTGTGATCCTTCGTGGACA |
| | TCTTCGTATTGCTGGACACCATCTAGGACGCTGTGACATCAAGGACCTGCCTAAAGAAATCACTGTT |
| | GCTACATCACGAACGCTTTCTTATTACAAATTGGGAGCTTCGCAGCGTGTAGCAGGTGACTCAGGTT |
| | TTGCTGCATACAGTCGCTACAGGATTGGCAACTATAAATTAAACACAGACCATTCCAGTAGCAGTGA |
| | CAATATTGCTTTGCTTGTACAGTAAGTGACAACAGATGTTTCATCTCGTTGACTTTCAGGTTACTAT |
| | AGCAGAGATATTACTAATTATTATGAGGACTTTTAAAGTTTCCATTTGGAATCTTGATTACATCATA |
| | AACCTCATAATTAAAAATTTATCTAAGTCACTAACTGAGAATAAATATTCTCAATTAGATGAAGAGC |
| | AACCAATGGAGATTGATTAAACGAACATGAAAATTATTCTTTTCTTGGCACTGATAACACTCGCTAC |
| | TTGTGAGCTTTATCACTACCAAGAGTGTGTTAGAGGTACAACAGTACTTTTAAAAGAACCTTGCTCT |
| | TCTGGAACATACGAGGGCAATTCACCATTTCATCCTCTAGCTGATAACAAATTTGCACTGACTTGCT |
| | TTAGCACTCAATTTGCTTTTGCTTGTCCTGACGGCGTAAAACACGTCTATCAGTTACGTGCCAGATC |
| | AGTTTCACCTAAACTGTTCATCAGACAAGAGGAAGTTCAAGAACTTTACTCTCCAATTTTTCTTATT |
| | GTTGCGGCAATAGTGTTTATAACACTTTGCTTCACACTCAAAAGAAAGACAGAATGATTGAACTTTC |
| | ATTAATTGACTTCTATTTGTGCTTTTTAGCCTTTCTGCTATTCCTTGTTTTAATTATGCTTATTATC |
| | TTTTGGTTCTCACTTGAACTGCAAGATCATAATGAAACTTGTCACGCCTAAACGAACATGAAATTTC |
| | TTGTTTTCTTAGGAATCATCACAACTGTAGCTGCATTTCACCAAGAATGTAGTTTACAGTCATGTAC |
| | TCAACATCAACCATATGTAGTTGATGACCCGTGTCCTATTCACTTCTATTCTAAATGGTATATTAGA |
| | GTAGGAGCTAGAAAATCAGCACCTTTAATTGAATTGTGCGTGGATGAGGCTGGTTCTAAATCACCCA |
| | TTCAGTACATCGATATCGGTAATTATACAGTTTCCTGTTTACCTTTTACAATTAATTGCCAGGAACC |
| | TAAATTGGGTAGTCTTGTAGTGCGTTGTTCGTTCTATGAAGACTTTTTAGAGTATCATGACGTTCGT |
| | GTTGTTTTAGATTTCATCTAAACGAACAAACTAAAATGTCTGATAATGGACCCCAAAATCAGCGAAA |
| | TGCACCCCGCATTACGTTTGGTGGACCCTCAGATTCAACTGGCAGTAACCAGAATGGAGAACGCAGT |
| | GGGGCGCGATCAAAACAACGTCGGCCCCAAGGTTTACCCAATAATACTGCGTCTTGGTTCACCGCTC |
| | TCACTCAACATGGCAAGGAAGACCTTAAATTCCCTCGAGGACAAGGCGTTCCAATTAACACCAATAG |
| | CAGTCCAGATGACCAAATTGGCTACTACCGAAGAGCTACCAGACGAATTCGTGGTGGTGACGGTAAA |
| | ATGAAAGATCTCAGTCCAAGATGGTATTTCTACTACCTAGGAACTGGGCCAGAAGCTGGACTTCCCT |
| | ATGGTGCTAACAAAGACGGCATCATATGGGTTGCAACTGAGGGAGCCTTGAATACACCAAAAGATCA |
| | CATTGGCACCCGCAATCCTGCTAACAATGCTGCAATCGTGCTACAACTTCCTCAAGGAACAACATTG |
| | CCAAAAGGCTTCTACGCAGAAGGGAGCAGAGGCGGCAGTCAAGCCTCTTCTCGTTCCTCATCACGTA |
| | GTCGCAACAGTTCAAGAAATTCAACTCCAGGCAGCAGTAAACGAACTTCTCCTGCTAGAATGGCTGG |
| | CAATGGCGGTGATGCTGCTCTTGCTTTGCTGCTGCTTGACAGATTGAACCAGCTTGAGAGCAAAATG |
| | TCTGGTAAAGGCCAACAACAACAAGGCCAAACTGTCACTAAGAAATCTGCTGCTGAGGCTTCTAAGA |
| | AGCCTCGGCAAAAACGTACTGCCACTAAAGCATACAATGTAACACAAGCTTTCGGCAGACGTGGTCC |
| | AGAACAAACCCAAGGAAATTTTGGGGACCAGGAACTAATCAGACAAGGAACTGATTACAAACATTGG |
| | CCGCAAATTGCACAATTTGCCCCCAGCGCTTCAGCGTTCTTCGGAATGTCGCGCATTGGCATGGAAG |
| | TCACACCTTCGGGAACGTGGTTGACCTACACAGGTGCCATCAAATTGGATGACAAAGATCCAAATTT |
| | CAAAGATCAAGTCATTTTGCTGAATAAGCATATTGACGCATACAAAACATTCCCACCAACAGAGCCT |
| | AAAAAGGACAAAAAGAAGAAGGCTGATGAAACTCAAGCCTTACCGCAGAGACAGAAGAAACAGCAAA |
| | CTGTGACTCTTCTTCCTGCTGCAGATTTGGATGATTTCTCCAAACAATTGCAACAATCCATGAGCAG |
| | TGCTGACTCAACTCAGGCCTAAACTCATGCAGACCACACAAGGCAGATGGGCTATATAAACGTTTTC |
| | GCTTTTCCGTTTACGATATATAGTCTACTCTTGTGCAGAATGAATTCTCGTAACTACATAGCACAAG |
| | TAGATGTAGTTAACTTTAATCTCACATAGCAATCTTTAATCAGTGTGTAACATTAGGGAGGACTTGA |
| | AAGAGCCACCACATTTTCACCGAGGCCACGCGGAGTACGATCGAGTGTACAGTGAACAATGCTAGGG |
| | AGAGCTGCCTATATGGAAGAGCCCTAATGTGTAAAATTAATTTTAGTAGTGCTATCCCCATGTGATT |
| | TTAATAGCTTCTTAGGAGAATGACAAAAA |
| 6 | GenBank Accession No. NC_006577.2 (Human coronavirus HKU1, complete |
| | genome) |
| | GAGTTTGAGCGATTGACGTTCGTACCGTCTATCAGCTTACGATCTCTTGTCAGATCTCATTAAATCT |
| | AAACTTTTTAAACAAGATTCCCTGTTATCCATGCTTGTGAGTGTGGTTTAATCATAATCTTGTATTT |
| | TACTTTCCACACTTTTCATCTCTCTGCCAGTGACGTGTTGGTTGTCCTCAGCGTCCCTCCCATAGGT |
| | CGCAATGATTAAAACCAGCAAATACGGTCTCGGCTTCAAGTGGGCGCCAGAATTTCGTTGGCTGCTT |
| | CCGGATGCAGCGGAGGAGTTGGCTAGTCCTATGAAGTCAGATGAGGGTGGGTTATGCCCCTCTACTG |
| | GTCAAGCGATGGAAAGTGTTGGATTCGTTTATGATAATCATGTGAAGATAGATTGTCGCTGCATTCT |
| | TGGACAAGAATGGCATGTGCAGTCAAATCTTATCCGTGATATTTTTGTTCATGAAGATCTACATGTT |
| | GTAGAAGTTCTAACTAAAACAGCCGTAAAGTCCGGTACGGCAATTTTAATTAAATCACCTTTGCATA |
| | GCTTGGGTGGTTTTCCTAAAGGGTATGTTATGGGCTTGTTCCGTTCATACAAGACTAAACGTTATGT |
| | TGTACATCATCTTTCTATGACTACATCTACTACTAATTTTGGTGAAGATTTTTTGGGTTGGATTGTA |
| | CCTTTTGGTTTTATGCCATCTTATGTTCACAAATGGTTTCAATTCTGTAGGTTGTATATTGAAGAGA |
| | GTGATTTAATAATTTCAAATTTTAAATTTGATGATTATGATTTTAGTGTAGAAGATGCTTATGCTGA |
| | GGTTCATGCTGAGCCTAAAGGTAAATATTCACAAAAAGCTTATGCTTTACTTAGACAATATCGTGGT |
| | ATTAAACCCGTACTTTTTGTAGACCAGTATGGTTGTGACTATTCTGGTAAATTAGCAGATTGTCTTC |
| | AAGCTTATGGTCATTATTCTTTGCAAGATATGAGACAAAAGCAGTCTGTATGGCTTGCCAATTGTGA |
| | CTTTGATATTGTAGTGGCTTGGCATGTAGTTCGTGATTCACGATTTGTTATGCGCCTGCAGACTATA |
| | GCTACTATTTGTGGTATTAAATATGTTGCACAACCTACAGAAGATGTAGTAGATGGAGATGTAGTTA |
| | TACGTGAACCTGTACATTTATTATCTGCTGATGCAATAGTTTTAAAGCTTCCTAGTTTGATGAAAGT |
| | TATGACTCATATGGATGATTTTTCTATTAAATCTATATATAATGTTGATTTGTGTGATTGTGGTTTT |
| | GTTATGCAGTATGGTTATGTAGATTGTTTTAATGATAATTGTGATTTTTATGGTTGGGTTTCAGGTA |
| | ATATGATGGATGGTTTTTCTTGTCCATTGTGTTGTACAGTTTATGACTCTAGCGAAGTTAAAGCCCA |
| | ATCATCTGGTGTTATTCCTGAAAATCCTGTGTTATTTACTAATAGTACTGATACTGTTAACCATGAT |
| | TCTTTTAATTTGTATGGTTATTCTGTCACACCATTTGGTTCTTGTATATATTGGTCGCCGCGTCCTG |
| | GATTGTGGATTCCTATAATTAAATCTTCAGTCAAGTCTTATGATGATTTGGTTTATTCAGGTGTAGT |
| | AGGTTGTAAATCTATTGTTAAAGAAACTGCTCTTATTACTCATGCACTTTACTTAGATTATGTTCAA |
| | TGTAAGTGTGGTAATCTTGAACAAAATCATATTCTTGGCGTTAATAATTCTTGGTGTAGGCAACTGT |
| | TGCTTAATAGAGGTGATTATAATATGCTTCTAAAAAATATTGACTTGTTTGTTAAGCGTCGTGCTGA |
| | TTTTGCTTGCAAGTTTGCAGTTTGTGGAGATGGTTTTGTACCTTTTTTACTAGATGGTTTAATTCCC |
| | CGTAGTTATTATCTAATTCAGAGTGGTATTTTCTTTACATCTTTGATGTCTCAATTTTCACAAGAAG |
| | TTTCTGATATGTGTTTAAAAATGTGTATTTTGTTTATGGACAGAGTTTCAGTTGCTACATTTTATAT |
| | AGAGCATTATGTTAATAGGTTGGTTACTCAATTTAAGTTATTGGGTACTACACTTGTTAATAAAATG |
| | GTTAATTGGTTTAATACCATGTTAGATGCTAGTGCACCTGCTACAGGCTGGCTTCTTTACCAATTAT |
| | TGAATGGTCTTTTTGTAGTATCTCAAGCCAACTTTAATTTTGTTGCTTTAATACCTGATTATGCTAA |
| | AATTTTAGTTAATAAATTTTACACTTTTTTTAAGTTATTATTAGAGTGTGTTACAGTTGATGTTTTA |
| | AAAGATATGCCTGTTCTTAAAACTATTAATGGTTTAGTTTGTATTGTAGGCAATAAGTTTTATAACG |
| | TTAGTACAGGGTTAATTCCTGGTTTTGTTTTACCATGTAATGCACAGGAACAACAAATTTATTTTTT |
| | TGAAGGCGTTGCAGAATCTGTTATAGTAGAAGATGATGTTATTGAGAATGTCAAATCTTCTTTATCA |
| | TCTTATGAGTATTGTCAACCACCTAAATCTGTAGAAAAAATTTGTATTATAGATAATATGTACATGG |
| | GTAAGTGTGGTGATAAATTTTTCCCTATTGTCATGAATGATAAAAATATTTGTCTTTTAGATCAGGC |
| | TTGGCGTTTTCCATGTGCAGGTAGAAAAGTTAATTTTAACGAGAAACCTGTTGTTATGGAGATTCCG |
| | TCTTTGATGACAGTTAAGGTTATGTTTGATTTAGATTCTACTTTTGATGATATTTTAGGTAAAGTTT |
| | GTTCAGAATTTGAAGTAGAAAAGGGTGTTACTGTAGATGATTTTGTTGCTGTTGTTTGTGATGCTAT |
| | AGAGAATGCTTTAAACTCTTGTAAAGAGCATCCAGTGGTTGGTTATCAAGTTCGTGCATTTTTAAAT |
| | AAACTTAATGAGAATGTTGTTTATTTATTTGATGAGGCTGGTGATGAAGCAATGGCCTCTCGTATGT |
| | ATTGTACTTTTGCTATTGAGGATGTTGAAGACGTTATCAGTAGTGAAGCTGTCGAAGATACTATTGA |
| | TGGTGTCGTTGAAGACACTATTAATGACGATGAAGATGTTGTTACTGGTGACAATGACGATGAAGAT |
| | GTTGTTACTGGTGACAATGACGATGAAGATGTTGTTACTGGTGACAATGACGATGAAGATGTTGTTA |
| | CTGGTGACAATGACGATGAAGATGTTGTTACTGGTGACAATGACGATGAAGATGTTGTTACTGGTGA |
| | CAATGACGATGAAGATGTTGTTACTGGTGACAATGACGATGAAGATGTTGTTACTGGTGACAATGAC |
| | GATGAAGATGTTGTTACTGGTGACAATGACGATGAAGATGTTGTTACTGGTGACAATGACGATGAAG |
| | ATGTTGTTACTGGTGACAATGACGATGAAGATGTTGTTACTGGTGACAATGACGATGAAGATGTTGT |
| | TACTGGTGACAATGACGATGAAGATGTTGTTACTGGTGACAATAACGATGAAGAGATTGTTACTGGT |
| | GACAATGATGACCAAATTGTTGTTACTGGTGATGATGTAGATGATATTGAAAGTATTTATGACTTTG |
| | ATACTTATAAAGCTCTTTTAGTTTTTAATGATGTCTATAATGATGCTTTGTTTGTTAGTTATGGTTC |
| | TAGTGTTGAAACAGAAACATATTTTAAAGTTAATGGTTTATGGTCACCTACTATTACACATACTAAT |
| | TGTTGGTTGCGTTCTGTGTTACTTGTAATGCAGAAATTACCTTTTAAGTTTAAGGATTTAGCTATTG |
| | AAAATATGTGGTTATCTTATAAGGTGGGTTATAATCAAAGTTTTGTTGATTATTTACTGACCACTAT |
| | TCCTAAAGCTATTGTTTTGCCTCAAGGTGGTTTTGTAGCTGATTTTGCTTATTGGTTTTTAAACCAG |
| | TTTGATATTAATGCGTATGCTAATTGGTGTTGTTTAAAATGTGGTTTTTCTTTTGATTTAAATGGTT |
| | TGGATGCTTTGTTTTTTTATGGAGATATTGTGTCTCATGTTTGTAAGTGTGGACATAATATGACTCT |
| | AATAGCAGCGGACTTACCTTGTACATTACATTTTTCATTATTTGATGACAATTTTTGTGCTTTTTGC |
| | ACCCCTAAAAAAATTTTTATTGCTGCATGTGCTGTGGATGTAAACGTTTGTCATTCTGTAGCTGTTA |
| | TAGGTGATGAACAAATAGATGGTAAGTTTGTTACTAAATTTAGTGGTGATAAATTTGATTTTATAGT |
| | AGGTTATGGAATGTCATTTAGTATGTCTTCTTTTGAGTTACCTCAATTGTATGGTTTGTGTATAACA |
| | CCTAATGTATGTTTTGTTAAAGGTGATATTATAAATGTTGCTAGACTTGTTAAAGCTGATGTTATTG |
| | TTAATCCTGCTAATGGGCATATGCTCCATGGTGGTGGAGTTGCAAAAGCTATAGCTGTAGCTGCAGG |
| | TAAAAAATTTTCTAAAGAAACTGCTGCTATGGTTAAATCTAAAGGTGTTTGCCAAGTAGGAGATTGT |
| | TATGTTTCTACCGGTGGTAAATTATGTAAAACAATTCTTAATATTGTAGGCCCTGATGCTAGACAAG |
| | ATGGAAGACAATCTTATGTTTTGTTAGCACGTGCTTATAAGCATCTTAATAATTATGATTGTTGTTT |
| | GTCTACTCTCATATCGGCTGGTATATTTAGTGTTCCTGCTGATGTGTCATTAACTTACCTTCTAGGT |
| | GTTGTTGATAAACAAGTTATCCTTGTTAGTAATAATAAAGAAGATTTTGATATTATTCAAAAATGTC |
| | AAATTACTTCAGTTGTTGGTACTAAAGCATTGGCTGTTAGATTAACTGCTAATGTAGGCCGTGTTAT |
| | TAAATTTGAGACAGATGCATACAAACTTTTTTTGAGTGGTGATGATTGTTTTGTTTCAAATTCTTCT |
| | GTTATACAAGAAGTTTTATTGCTTCGTCATGATATACAATTGAATAATGACGTTCGTGATTATTTGT |
| | TGTCTAAGATGACTAGTCTTCCTAAAGATTGGCGTCTTATCAATAAATTTGATGTTATTAACGGTGT |
| | TAAAACTGTTAAGTATTTTGAGTGTCCTAATTCTATTTATATATGTAGTCAGGGTAAAGACTTTGGT |
| | TATGTATGTGATGGTTCTTTTTATAAAGCAACTGTTAATCAAGTTTGTGTTTTATTAGCTAAGAAGA |
| | TAGATGTTTTGCTTACTGTAGATGGTGTTAATTTTAAATCTATTTCTCTTACTGTAGGTGAAGTTTT |
| | TGGTAAAATACTTGGTAATGTTTTCTGTGATGGCATTGATGTTACTAAGTTAAAGTGTAGTGATTTT |
| | TATGCCGATAAAATTTTATATCAGTATGAAAATTTGTCTTTAGCTGATATTTCTGCTGTACAAAGTT |
| | CATTTGGGTTTGATCAGCAACAATTGCTTGCTTATTATAATTTTTTAACAGTATGTAAATGGTCTGT |
| | AGTTGTTAACGGTCCATTTTTTTCTTTTGAACAGTCTCATAATAATTGTTATGTGAATGTAGCTTGT |
| | CTTATGTTGCAGCATATTAATCTTAAATTTAATAAATGGCAGTGGCAGGAAGCATGGTATGAATTTC |
| | GTGCTGGCAGACCACATAGGTTAGTTGCTCTTGTTTTAGCTAAAGGTCATTTTAAATTTGATGAACC |
| | ATCAGATGCTACTGATTTTATTCGTGTTGTTTTGAAACAAGCTGATTTATCAGGTGCAATTTGTGAA |
| | TTAGAACTTATTTGTGATTGTGGTATTAAACAAGAAAGTCGTGTTGGTGTTGATGCTGTTATGCATT |
| | TTGGTACATTAGCAAAGACTGATCTTTTTAATGGTTATAAGATTGGCTGTAATTGTGCAGGTAGAAT |
| | TGTCCATTGTACTAAATTGAATGTACCATTTTTGATTTGTTCTAATACTCCTCTGAGTAAGGATTTA |
| | CCTGATGATGTTGTTGCAGCTAACATGTTTATGGGTGTAGGTGTAGGCCATTATACACATTTGAAAT |
| | GTGGTTCACCTTACCAACATTATGATGCTTGTAGTGTTAAAAAATATACAGGTGTTAGTGGTTGTTT |
| | AACTGACTGCTTGTATCTTAAAAATTTAACCCAGACTTTTACATCTATGTTGACTAATTATTTTTTG |
| | GATGATGTTGAAATGGTTGCTTATAACCCTGATCTTTCACAATATTATTGTGATAATGGTAAGTATT |
| | ATACAAAACCTATTATAAAGGCTCAGTTTAAACCATTTGCTAAAGTTGACGGTGTTTATACTAACTT |
| | TAAGTTAGTTGGACATGATATTTGTGCTCAATTGAATGATAAGTTAGGTTTTAATGTAGATTTGCCG |
| | TTTGTTGAGTACAAAGTAACAGTCTGGCCTGTAGCTACTGGTGATGTTGTTTTGGCATCTGATGATT |
| | TATATGTGAAACGTTATTTTAAAGGATGTGAAACTTTTGGTAAGCCTGTTATTTGGTTTTGTCATGA |
| | TGAAGCATCATTGAATTCTCTTACTTATTTTAATAAACCTAGTTTTAAATCTGAAAATAGATATAGT |
| | GTTTTGTCTGTTGATTCTGTATCTGAGGAGTCACAAGGTAATGTGGTTACTTCTGTTATGGAATCGC |
| | AGATTAGTACTAAAGAGGTTAAGTTAAAGGGTGTTAGAAAGACTGTTAAAATAGAAGATGCTATTAT |
| | TGTTAATGATGAAAATAGTTCTATTAAGGTTGTTAAAAGTTTATCTTTAGTTGATGTTTGGGATATG |
| | TATTTGACAGGTTGTGATTATGTTGTTTGGGTTGCTAATGAATTGTCACGCCTAGTTAAATCACCAA |
| | CAGTTAGGGAATATATACGATATGGTATTAAACCTATTACTATACCTATAGATTTGTTATGTTTAAG |
| | AGATGATAATCAAACTCTTTTAGTTCCTAAAATTTTTAAAGCAAGAGCTATAGAATTTTATGGTTTT |
| | TTGAAGTGGTTGTTTATTTATGTTTTTAGTTTATTACATTTTACAAATGATAAAACCATTTTTTATA |
| | CTACAGAAATAGCTTCTAAGTTTACTTTTAATTTGTTTTGTTTGGCTCTTAAAAATGCTTTTCAGAC |
| | ATTTAGATGGAGTATATTTATAAAAGGTTTTCTTGTTGTAGCCACTGTGTTTTTGTTTTGGTTTAAT |
| | TTTTTGTATATAAATGTTATTTTTAGTGACTTTTATCTTCCTAATATTAGTGTTTTTCCTATTTTTG |
| | TGGGAAGAATTGTTATGTGGATAAAGGCTACTTTTGGTTTGGTTACAATTTGTGATTTTTATTCTAA |
| | GTTAGGTGTAGGTTTTACAAGTCATTTTTGTAATGGTAGTTTTATATGTGAATTGTGTCATTCTGGT |
| | TTTGATATGTTGGATACATATGCAGCTATAGATTTTGTTCAGTATGAAGTAGATAGACGTGTTTTAT |
| | TTGATTATGTTAGTTTAGTCAAATTAATTGTTGAACTCGTTATTGGTTATTCATTATACACAGTATG |
| | GTTTTATCCATTATTTTGTCTTATTGGTTTACAATTATTTACTACATGGTTGCCTGATTTGTTTATG |
| | TTAGAAACTATGCATTGGTTGATTAGATTTATTGTATTTGTAGCTAATATGTTACCTGCTTTTGTCT |
| | TGTTGCGGTTTTATATAGTTGTTACTGCTATGTATAAAGTAGTTGGTTTTATTAGGCATATTGTCTA |
| | TGGTTGTAATAAAGCTGGTTGTTTATTTTGTTATAAACGAAATTGTAGTGTTCGTGTTAAGTGTAGT |
| | ACTATTGTTGGTGGTGTAATTCGTTATTATGATATTACTGCTAATGGTGGTACTGGTTTTTGTGTTA |
| | AACATCAATGGAATTGTTTTAATTGCCATTCTTTTAAACCAGGTAACACTTTTATAACTGTAGAAGC |
| | TGCTATAGAACTTTCTAAAGAGCTTAAACGACCTGTAAATCCAACTGATGCTTCACATTATGTAGTT |
| | ACTGATATTAAGCAAGTTGGTTGTATGATGCGTTTGTTCTATGATAGAGATGGACAGCGTGTTTACG |
| | ATGATGTTGATGCTAGTTTATTTGTAGATATTAATAATCTGTTACATTCTAAAGTTAAAGTTGTTCC |
| | TAATTTGTATGTAGTTGTAGTAGAGAGTGATGCTGATAGAGCTAATTTTCTGAATGCTGTTGTGTTT |
| | TATGCACAATCATTGTATAGGCCTATATTACTTGTAGACAAAAAGTTAATTACTACAGCTTGTAATG |
| | GTATCTCTGTAACCCAGACTATGTTTGATGTTTATGTTGATACTTTTATGTCTCATTTTGATGTTGA |
| | TAGAAAGAGTTTTAATAATTTTGTTAACATTGCTCATGCTTCTCTTAGAGAGGGTGTGCAATTAGAA |
| | AAGGTTTTAGATACTTTTGTGGGATGTGTACGTAAATGTTGTTCCATTGATTCAGATGTTGAAACAA |
| | GATTTATTACTAAATCTATGATATCTGCAGTAGCTGCTGGTTTGGAATTTACTGATGAAAATTATAA |
| | CAATTTGGTACCTACATATTTAAAGAGTGATAATATTGTAGCTGCTGATTTAGGTGTTCTTATACAG |
| | AATGGTGCTAAGCATGTACAGGGTAATGTTGCTAAGGCAGCTAATATTTCTTGTATATGGTTTATTG |
| | ATGCTTTTAATCAACTTACTGCTGATTTACAGCATAAATTAAAAAAAGCATGTGTTAAAACTGGCTT |
| | GAAGTTAAAATTGACTTTTAATAAGCAAGAGGCAAGTGTCCCTATTCTTACAACACCCTTTTCACTT |
| | AAAGGAGGTGTTGTATTGAGTAATTTGTTATATATATTATTTTTTGTTAGTTTAATCTGTTTTATAT |
| | TATTGTGGGCTTTATTGCCTACATATAGTGTTTATAAGTCTGATATTCATTTGCCTGCTTATGCTAG |
| | TTTTAAAGTTATTGATAATGGTGTTGTTAGAGATATTTCAGTTAATGATTTATGTTTTGCTAATAAA |
| | TTTTTCCAATTTGATCAATGGTATGAGTCCACTTTTGGGTCTGTTTACTATCATAATTCTATGGATT |
| | GCCCTATTGTAGTGGCAGTTATGGATGAAGATATCGGTTCTACTATGTTTAATGTTCCTACTAAAGT |
| | TTTGAGACATGGCTTTCATGTTTTACATTTTTTAACTTATGCATTTGCTAGTGATAGTGTTCAGTGC |
| | TATACACCACATATTCAGATTTCTTATAATGATTTTTATGCTAGTGGTTGTGTTTTATCATCTTTGT |
| | GTACTATGTTTAAAAGAGGTGATGGTACACCACATCCTTATTGTTATTCAGATGGTGTTATGAAGAA |
| | TGCTTCTTTGTATACATCTTTGGTTCCACATACACGTTATAGCCTTGCTAATTCTAATGGTTTTATA |
| | AGATTTCCTGATGTTATTAGTGAAGGTATTGTACGTATTGTAAGAACGCGCTCTATGACTTATTGTA |
| | GAGTGGGTGCATGTGAATACGCCGAAGAGGGTATATGTTTTAATTTTAATAGTTCCTGGGTTTTGAA |
| | TAATGATTATTATAGAAGTATGCCTGGAACTTTTTGTGGTAGAGATCTTTTTGATTTGTTTTATCAA |
| | TTTTTTAGTAGTTTAATTCGTCCTATAGATTTCTTTTCTCTTACTGCTAGTTCTATTTTTGGAGCTA |
| | TATTGGCTATAGTTGTTGTCTTGGTTTTTTATTATTTAATAAAACTTAAGCGTGCTTTTGGAGATTA |
| | TACTAGTGTTGTAGTTATAAATGTTGTTGTTTGGTGTATTAATTTTCTTATGCTTTTTGTTTTTCAA |
| | GTTTATCCTATTTGTGCATGTGTTTATGCTTGTTTTTATTTTTATGTAACATTGTATTTTCCTTCTG |
| | AAATTAGTGTAATTATGCATTTGCAATGGATTGTTATGTATGGTGCTATAATGCCTTTTTGGTTTTG |
| | TGTCACATATGTAGCTATGGTTATTGCAAACCATGTTTTATGGTTATTTTCATATTGTAGGAAAATT |
| | GGTGTTAATGTATGTAGTGATAGTACATTTGAAGAAACATCTCTTACTACTTTTATGATTACTAAAG |
| | ATTCTTATTGTAGATTAAAGAATTCTGTTTCTGATGTTGCCTACAATAGATATTTGAGTTTGTATAA |
| | TAAGTATCGTTACTATAGTGGTAAAATGGATACTGCTGCCTATAGAGAAGCGGCGTGTTCTCAGTTA |
| | GCTAAAGCTATGGAAACATTTAATCACAATAATGGTAATGATGTCTTATACCAACCTCCTACAGCAT |
| | CTGTTTCTACATCTTTTTTGCAATCAGGTATTGTAAAGATGGTATCTCCTACGTCAAAAATTGAACC |
| | TTGTATTGTTAGTGTTACTTATGGTAGTATGACTTTGAATGGTTTATGGTTAGATGACAAAGTTTAT |
| | TGTCCTCGTCATGTTATATGTTCATCCTCTAATATGAACGAACCTGATTATTCTGCCTTATTGTGTA |
| | GAGTTACTCTAGGTGATTTTACTATAATGTCTGGTCGGATGAGTTTAACAGTTGTGTCTTACCAGAT |
| | GCAGGGCTGTCAACTTGTTTTGACAGTCTCTTTACAAAATCCTTACACTCCAAAATATACTTTTGGT |
| | AATGTTAAACCTGGTGAAACTTTTACTGTTTTAGCTGCGTATAATGGCCGACCACAAGGGGCATTTC |
| | ATGTTACTATGCGTAGTAGTTATACTATTAAAGGTTCTTTTTTGTGTGGGTCATGTGGATCTGTTGG |
| | TTATGTATTAACAGGTGATAGTGTTAAGTTTGTATATATGCATCAATTAGAGCTCAGTACTGGTTGT |
| | CACACTGGCACTGATTTTACTGGTAATTTTTATGGTCCATATAGAGATGCTCAAGTTGTACAGTTGC |
| | CAGTTAAGGACTACGTCCAGACTGTTAATGTTATTGCTTGGCTCTATGCAGCTATACTTAATAATTG |
| | TGCTTGGTTTGTACAAAATGATGTTTGTTCTACTGAAGATTTTAATGTTTGGGCTATGGCAAATGGT |
| | TTTAGCCAAGTAAAAGCAGATCTTGTCTTAGATGCTTTGGCTTCAATGACAGGTGTTTCTATTGAAA |
| | CTTTATTGGCTGCTATTAAGCGTCTATATATGGGATTTCAAGGTCGTCAAATACTAGGAAGTTGTAC |
| | TTTTGAAGATGAATTGGCACCTTCTGACGTTTATCAACAATTGGCTGGTGTTAAATTGCAATCTAAA |
| | ACAAAAAGATTTATTAAAGAAACAATTTATTGGATTTTGATATCTAGATTTTTGTTTAGTTGTATAA |
| | TTTCTGCATTTGTTAAATGGACTATATTTATGTATATTAATACACATATGATTGGTGTTACATTATG |
| | TGTACTTTGTTTTGTTAGTTTTATGATGTTACTAGTTAAACATAAGCATTTTTATTTGACTATGTAT |
| | ATAATTCCTGTACTCTGTACCTTGTTTTATGTAAATTATTTAGTTGTTTATAAGGAAGGTTTTAGAG |
| | GTTTTACTTATGTCTGGCTCTCATATTTTGTTCCTGCTGTGAATTTTACTTATGTTTATGAAGTATT |
| | TTATGGTTGTATTTTATGTGTTTTTGCTATTTTTATAACTATGCATAGTATTAATCATGACATTTTT |
| | TCTTTGATGTTTTTGGTTGGTAGAATAGTTACTTTAATTTCTATGTGGTATTTTGGGTCGAATTTAG |
| | AAGAGGATGTTTTGTTATTTATTACAGCCTTTTTAGGTACTTATACATGGACCACTATTTTGTCATT |
| | AGCTATAGCAAAAATTGTTGCTAATTGGTTGTCTGTTAATATATTTTATTTTACAGATGTACCTTAT |
| | ATTAAATTGATTCTCTTGAGTTACTTATTTATAGGGTATATTTTATCTTGTTATTGGGGATTTTTCT |
| | CTCTTTTAAACAGTGTTTTTAGAATGCCTATGGGTGTTTATAATTATAAAATTTCTGTTCAAGAATT |
| | GCGTTATATGAATGCTAATGGCTTACGTCCACCTCGTAATAGTTTTGAGGCTATTTTGTTAAATTTA |
| | AAACTGCTTGGAATAGGTGGCGTGCCAGTTATTGAAGTCTCCCAAATTCAATCAAAATTGACTGATG |
| | TGAAATGTGCTAATGTTGTTTTGTTAAATTGTTTACAGCATTTGCATGTTGCTTCTAATTCTAAGTT |
| | GTGGCAGTATTGTAGTGTTTTACATAATGAAATACTATCTACTTCAGATTTGAGTGTAGCTTTTGAT |
| | AAGCTTGCTCAATTATTGATTGTTTTATTCGCCAATCCTGCTGCAGTTGATACTAAGTGTCTTGCAA |
| | GTATAGATGAAGTTAGCGATGATTATGTTCAAGATAGTACCGTTTTGCAGGCTTTGCAAAGTGAGTT |
| | TGTAAATATGGCTAGTTTTGTTGAATATGAAGTCGCAAAGAAAAATTTGGCTGATGCTAAAAATAGT |
| | GGTTCTGTTAATCAACAACAGATAAAACAGTTAGAAAAAGCATGTAATATAGCTAAGTCTGTGTATG |
| | AACGTGATAAAGCTGTAGCTCGCAAACTTGAACGTATGGCAGACCTAGCACTTACTAACATGTATAA |
| | AGAGGCTCGGATTAATGATAAGAAGAGTAAAGTTGTTTCCGCTTTGCAGACAATGCTTTTTAGCATG |
| | GTTCGTAAATTGGATAATCAGGCTTTAAATTCTATTCTGGATAATGCTGTTAAAGGTTGTGTACCTT |
| | TGAGTGCTATTCCAGCATTGGCTGCTAATACTTTAACTATAGTAATACCAGATAAACAAGTTTTTGA |
| | TAAAGTTGTTGATAATGTTTATGTTACATATGCTGGTAGTGTATGGCATATACAGACTGTTCAAGAT |
| | GCTGATGGTATTAATAAACAGTTAACTGATATTAGTGTTGATTCTAATTGGCCTCTTGTTATCATTG |
| | CGAACAGGTATAATGAAGTTGCTAATGCTGTTATGCAGAATAATGAGTTGATGCCTCATAAATTAAA |
| | AATACAAGTTGTTAATAGTGGTTCTGATATGAATTGTAATATTCCTACTCAATGTTATTATAATAAT |
| | GGTAGTAGTGGTAGAATAGTTTATGCTGTTCTTAGTGATGTTGATGGTCTTAAGTATACTAAGATAA |
| | TGAAAGATGATGGAAATTGTGTTGTTTTAGAGCTTGATCCTCCTTGTAAATTTTCTATACAAGATGT |
| | TAAGGGACTTAAAATTAAGTATCTTTATTTTATTAAAGGATGTAACACTTTAGCTAGAGGGTGGGTT |
| | GTTGGTACTTTATCTTCAACAATTAGATTGCAGGCTGGTGTTGCTACTGAGTATGCAGCTAATTCTT |
| | CTATACTTTCATTATGTGCATTTTCTGTAGATCCTAAGAAAACTTATTTAGATTATATACAACAAGG |
| | TGGTGTACCTATAATTAATTGTGTTAAAATGCTCTGTGATCATGCTGGTACTGGTATGGCCATTACT |
| | ATTAAACCTGAGGCTACTATTAACCAAGATTCTTATGGTGGTGCCTCAGTTTGTATTTATTGCCGTG |
| | CACGTGTAGAGCATCCAGATGTAGATGGTATATGTAAATTACGTGGTAAATTTGTACAAGTCCCTTT |
| | GGGTATAAAAGATCCTATTCTTTATGTGTTAACACATGATGTTTGTCAAGTCTGTGGTTTTTGGAGA |
| | GATGGCAGTTGTTCCTGTGTAGGTTCAAGTGTCGCTGTTCAATCTAAAGATTTAAATTTTTTAAACG |
| | GGTTCGGGGTACTAGTGTGAATGCCCGGCTAGTACCCTGTGCTAGTGGTTTATCTACTGATGTTCAA |
| | TTAAGGGCATTTGACATTTGTAATACCAATAGAGCTGGTATAGGTTTATATTATAAAGTGAATTGTT |
| | GCCGTTTTCAGCGTATAGATGACGACGGTAATAAATTGGATAAGTTCTTTGTTGTCAAAAGAACTAA |
| | TTTAGAAGTTTATAATAAAGAGAAAACTTATTATGAGTTGACTAAAAGTTGTGGTGTTGTGGCTGAA |
| | CATGATTTCTTTACATTTGATATTGATGGTAGTCGCGTGCCACATATAGTTCGTAGGAATCTTTCAA |
| | AGTATACTATGTTAGATCTTTGCTATGCATTGCGTCATTTTGATCGTAATGATTGTTCAATATTGTG |
| | TGAAATTCTTTGTGAGTATGCTGATTGTAAAGAATCCTACTTTTCTAAGAAAGATTGGTATGATTTT |
| | GTTGAAAATCCTGATATTATTAATATATATAAAAAATTAGGCCCTATTTTTAATAGAGCTTTACTTA |
| | ATACTGTCATTTTTGCAGACACCTTAGTTGAAGTAGGTTTAGTTGGTGTTTTAACTTTAGATAACCA |
| | AGATTTGTATGGTCAATGGTATGATTTTGGTGATTTTATACAAACAGCCCCAGGGTTTGGTGTGGCA |
| | GTTGCAGATTCTTACTATTCTTATATGATGCCTATGTTGACTATGTGTCATGTATTAGATTGTGAAT |
| | TATTTGTTAATGATAGTTATAGACAATTCGATCTTGTACAGTATGATTTTACTGATTACAAGTTAGA |
| | GTTGTTTAATAAGTATTTTAAGTATTGGGGTATGAAGTATCATCCTAATACTGTGGATTGTGATAAT |
| | GATAGGTGTATTATTCATTGTGCTAATTTTAATATACTATTTAGTATGGTTTTACCTAATACTTGTT |
| | TTGGTCCCCTTGTTAGACAAATTTTTGTAGATGGTGTACCGTTTGTTGTTTCTATTGGTTACCATTA |
| | CAAAGAGTTAGGTGTAGTTATGAACTTAGATGTTGACACACACCGTTATCGTTTGTCTCTTAAAGAT |
| | TTACTTCTTTATGCAGCAGATCCTGCTATGCACGTTGCATCTGCTAGTGCTCTGCTTGATTTACGAA |
| | CTTGTTGTTTTAGTGTAGCTGCCATTACAAGTGGTATAAAATTTCAAACTGTAAAACCAGGTAACTT |
| | TAACCAAGACTTTTACGAGTTTGTTAAAAGTAAAGGCTTGTTTAAAGAGGGTAGTACAGTTGATTTG |
| | AAACATTTTTTCTTTACTCAAGATGGTAATGCTGCAATTACTGATTATAATTATTATAAGTATAATT |
| | TACCTACTATGGTTGATATTAAGCAGTTATTGTTTGTATTAGAAGTTGTTTATAAATATTTTGAAAT |
| | TTATGATGGTGGTTGTATACCAGCATCACAAGTTATTGTTAATAATTATGATAAAAGTGCTGGTTAT |
| | CCATTTAATAAATTTGGTAAAGCCAGACTTTATTATGAGGCATTATCATTTGAGGAACAGAATGAAA |
| | TTTATGCATATACTAAACGTAATGTTCTGCCCACCTTAACTCAAATGAATTTAAAATATGCTATCAG |
| | TGCTAAGAATAGAGCTCGCACTGTAGCAGGTGTTTCTATTCTTAGTACTATGACAGGCCGAATGTTC |
| | CATCAAAAATGTTTGAAGAGTATAGCAGCTACCCGAGGTGTTCCTGTTGTTATAGGAACCACTAAAT |
| | TTTATGGTGGTTGGGACGATATGTTACGTCATCTTATAAAGGATGTTGACAACCCTGTTCTTATGGG |
| | TTGGGATTATCCTAAATGTGATCGTGCTATGCCAAATATTTTGCGTATTGTTAGTAGTTTAGTTTTG |
| | GCCCGCAAACATGAATTTTGTTGTTCACATGGTGATAGATTTTATCGCCTTGCGAATGAATGTGCTC |
| | AAGTTTTGAGTGAAATAGTTATGTGTGGCGGTTGCTATTATGTTAAGCCTGGTGGTACTAGCAGTGG |
| | TGATGCAACTACTGCTTTTGCTAATTCTGTTTTTAATATATGTCAGGCTGTTACTGCTAATGTTTGT |
| | TCTCTTATGGCCTGTAATGGCCATAAGATTGAAGATTTAAGTATACGCAATTTACAAAAACGCTTAT |
| | ACTCTAATGTTTATCGTACAGATTATGTTGATTATACATTTGTTAATGAGTATTATGAATTTTTATG |
| | TAAGCATTTTAGTATGATGATTTTGAGTGATGATGGTGTTGTCTGTTATAACTCTGATTATGCTAGT |
| | AAGGGTTATATAGCTAATATAAGTGTTTTTCAACAAGTTTTGTACTATCAGAATAATGTCTTTATGT |
| | CTGAATCTAAATGTTGGGTTGAAAATGATATTACTAATGGTCCTCATGAATTTTGTTCCCAACATAC |
| | TATGTTAGTTAAGATAGATGGTGATTATGTTTATTTACCATATCCAGATCCTTCTAGAATTTTAGGA |
| | GCTGGTTGTTTTGTTGATGATTTATTGAAGACTGACAGTGTTCTTTTGATAGAGCGCTTTGTAAGTC |
| | TAGCTATAGATGCTTACCCTTTAGTACATCATGAAAATGAAGAATACCAAAAAGTCTTTCGTGTATA |
| | TTTAGAATATATAAAAAAACTGTATAATGATCTTGGTACTCAGATCTTAGATAGTTATAGTGTTATT |
| | TTAAGTACTTGTGATGGTTTAAAGTTTACTGAAGAATCATTTTACAAGAATATGTATTTAAAAAGTG |
| | CCGTGATGCAGAGTGTAGGTGCATGCGTTGTTTGTTCATCACAAACTTCTTTGCGTTGTGGCAGTTG |
| | TATACGTAAGCCTTTGTTATGTTGTAAATGTTGTTATGACCATGTTATGGCAACTAATCATAAATAT |
| | GTTTTGAGTGTCTCACCTTACGTTTGTAATGCACCTAACTGTGATGTGAGTGATGTCACCAAATTAT |
| | ATTTGGGCGGTATGTCTTACTATTGTGAAAACCATAAACCCCATTATTCATTTAAGTTAGTTATGAA |
| | TGGTATGGTCTTTGGTTTGTATAAACAATCTTGCACGGGTTCACCTTATATAGATGATTTTAATAAG |
| | ATAGCTAGTTGTAAATGGACAGAAGTTGATGATTATGTTCTGGCAAATGAGTGTATTGAACGTTTAA |
| | AGTTATTTGCTGCAGAAACTCAAAAGGCAACTGAAGAGGCTTTTAAACAAAGCTATGCTTCTGCTAC |
| | CATTCAAGAGATTGTTAGTGATAGAGAAGTTATTTTGTGTTGGGAGACAGGTAAAGTTAAACCACCA |
| | CTTAATAAAAATTATGTTTTCACAGGCTACCATTTTACTAGTACTGGTAAGACAGTTTTAGGTGAGT |
| | ATGTTTTTGATAAAAGTGAATTAACTAACGGTGTGTATTACCGCGCTACAACTACTTATAAACTTTC |
| | TATAGGTGATGTTTTTGTTTTAACATCACATTCTGTAGCTAGTTTAAGTGCACCTACACTTGTCCCA |
| | CAAGAGAACTATGCTAGTATAAGATTTTCTAGTGTTTATAGTGTTCCATTGGTGTTTCAAAATAATG |
| | TTGCTAATTATCAGCACATTGGAATGAAACGTTATTGCACTGTTCAAGGTCCCCCTGGTACGGGAAA |
| | GTCTCATCTTGCTATAGGTCTAGCTGTTTATTACTACACAGCACGTGTAGTTTATACTGCTGCTAGT |
| | CATGCTGCTGTAGATGCATTGTGTGAAAAAGCTTATAAGTTTTTAAATATTAACGATTGTACACGTA |
| | TTATTCCTGCTAAAGTTCGTGTAGATTGTTATGATAAGTTTAAAATTAATGATACCACTTGTAAGTA |
| | TGTTTTTACCACAATAAATGCATTACCAGAGTTGGTTACAGATATTGTTGTTGTTGATGAAGTTAGT |
| | ATGCTTACTAATTATGAATTGTCTGTTATAAATGCTCGTATTAAAGCTAAACATTATGTATATATTG |
| | GAGATCCTGCTCAATTACCTGCACCACGTGTGCTGTTGAGCAAGGGTTCTTTAGAACCTAGGCACTT |
| | CAATTCTATTACTAAAATAATGTGTTGTTTAGGTCCTGATATCTTTTTGGGAAATTGTTATAGGTGT |
| | CCTAAAGAAATTGTAGAAACTGTTTCAGCATTGGTTTATGATAATAAACTCAAGGCTAAAAATGATA |
| | ATAGTTCATTATGTTTTAAAGTATATTTTAAGGGACAGACAACACATGAGAGTTCAAGTGCTGTAAA |
| | TATTCAACAGATATATCTAATTAGTAAATTTTTAAAAGCTAATCCAGTTTGGAATAGTGCTGTTTTT |
| | ATTAGTCCTTATAATAGTCAGAATTATGTTGCTAAGCGTGTTTTAGGTGTTCAAACACAAACTGTAG |
| | ATTCTGCTCAAGGTTCGGAATATGATTATGTTATATATTCACAAACAGCAGAAACAGCCCATTCTGT |
| | TAATGTTAATCGATTTAATGTTGCCATAACTAGAGCCAAGAAGGGCATTTTTTGTGTTATGAGTAAT |
| | ATGCAATTATTTGAATCTCTTAATTTTATTACTCTACCTTTAGATAAAATTCAAAATCAAACTTTAC |
| | CTCGTTTGCATTGCACAACTAATCTTTTTAAAGATTGTAGTAAAAGTTGCTTAGGTTATCATCCAGC |
| | GCATGCCCCCTCATTTTTAGCAGTTGATGATAAATATAAGGTTAATGAAAATTTGGCTGTAAATTTA |
| | AATATTTGTGAACCTGTTTTAACATATTCTCGTTTAATATCTCTTATGGGTTTTAAATTAGATTTGA |
| | CTCTTGATGGTTATTCTAAATTGTTTATTACTAAAGATGAAGCCATTAAACGTGTTAGAGGTTGGGT |
| | TGGTTTTGATGTTGAGGGCGCTCATGCTACTCGCGAAAACATTGGAACAAACTTTCCACTGCAAATA |
| | GGTTTTTCAACTGGTGTGGATTTTGTAGTTGAAGCTACTGGCTTATTTGCTGAGAGAGATTGTTATA |
| | CTTTTAAAAAAACTGTAGCTAAAGCTCCTCCTGGTGAAAAATTTAAACATTTAATACCCCTTATGTC |
| | AAAAGGTCAAAAGTGGGATATTGTTAGAATTAGAATTGTTCAAATGTTATCTGATTATCTTTTAGAC |
| | CTTTCTGATAGTGTAGTATTTATTACTTGGTCTGCCAGTTTTGAACTTACTTGTTTAAGGTATTTTG |
| | CTAAATTAGGCAGAGAGCTTAATTGTAATGTGTGTTCTAATCGTGCTACATGCTACAATTCTAGAAC |
| | TGGTTATTATGGTTGTTGGCGCCATAGTTATACTTGTGATTATGTGTATAATCCACTTATTGTAGAT |
| | ATACAACAGTGGGGTTATACAGGTTCTTTAACTAGTAATCACGATATAATTTGTAATGTACATAAAG |
| | GTGCACATGTTGCGTCAGCTGATGCAATTATGACTCGTTGTTTAGCAATCTATGATTGTTTTTGTAA |
| | ATCTGTTAATTGGAATTTAGAGTATCCAATAATTTCTAATGAGGTCAGTATAAATACATCTTGTAGG |
| | TTATTGCAGCGTGTCATGCTTAAAGCTGCCATGCTATGTAATAGATACAACTTATGTTATGACATAG |
| | GCAATCCTAAAGGTTTAGCTTGTGTCAAAGATTATGAATTTAAATTTTATGATGCTTTTCCTGTAGC |
| | CAAGTCTGTTAAACAGTTATTTTATGTCTATGATGTGCATAAAGATAATTTTAAAGATGGTTTATGT |
| | ATGTTTTGGAATTGTAATGTTGATAAATATCCATCTAATTCAATTGTTTGTAGATTTGACACTCGAG |
| | TGTTAAATAAATTAAACCTTCCTGGATGTAATGGTGGTAGTTTGTATGTTAATAAACATGCATTCCA |
| | TACTAATCCTTTTACTAGAACTGTTTTTGAAAATCTTAAGCCTATGCCTTTTTTCTATTATTCAGAT |
| | ACGCCTTGTGTGTACGTAGATGGTTTAGAATCTAAACAAGTTGATTACGTTCCTTTAAGAAGCGCCA |
| | CTTGTATCACACGGTGTAATCTAGGTGGAGCTGTTTGTTCAAAGCATGCTGAAGAATATTGTAACTA |
| | CCTTGAGTCTTATAATATAGTTACTACAGCAGGCTTTACTTTTTGGGTTTATAAGAATTTTGATTTT |
| | TATAATTTATGGAACACTTTTACTACGTTACAGAGTTTAGAAAACGTAATATATAACTTGGTTAATG |
| | TTGGTCATTATGATGGACGTACAGGTGAATTACCTTGTGCTATTATGAATGACAAAGTTGTTGTTAA |
| | GATTAATAATGTAGATACTGTTATTTTTAAAAATAATACATCATTTCCTACTAATATAGCTGTTGAA |
| | TTGTTTACAAAACGTAGTATCCGGCACCACCCTGAACTTAAGATTCTTAGAAATTTGAACATTGATA |
| | TTTGTTGGAAGCATGTCCTGTGGGATTATGTTAAAGATAGTTTGTTTTGTAGTTCCACTTATGGTGT |
| | TTGTAAATACACAGATTTGAAGTTCATCGAAAATTTGAATATACTTTTTGATGGTCGTGACACTGGC |
| | GCTTTAGAAGCTTTTAGAAAAGCAAGAAATGGTGTTTTTATTAGTACTGAAAAATTAAGTAGGTTAT |
| | CAATGATTAAAGGTCCGCAACGAGCTGATTTAAATGGTGTGATTGTGGATAAAGTTGGAGAACTCAA |
| | AGTTGAGTTTTGGTTCGCTATGAGAAAAGATGGTGACGATGTTATCTTCAGCCGAACAGACAGCCTA |
| | TGCTCAAGCCATTACTGGAGCCCACAAGGTAATCTAGGTGGTAATTGCGCGGGTAATGTCATTGGTA |
| | ATGATGCTCTAACACGTTTTACTATCTTTACTCAGAGTCGTGTATTGTCAAGTTTTGAACCTCGCTC |
| | AGATTTAGAACGGGATTTTATTGATATGGATGATAATCTGTTTATTGCTAAATATGGTTTAGAAGAC |
| | TATGCATTTGATCATATAGTTTATGGTAGTTTTAACCATAAAGTTATAGGAGGTTTGCATTTGCTTA |
| | TAGGCTTATTTCGTAGGAAAAAAAAATCTAATTTGTTAATTCAAGAGTTTTTACAGTATGATTCTAG |
| | TATTCATTCATATTTTATTACTGATCAGGAGTGTGGTAGTAGTAAGAGTGTTTGTACAGTTATTGAT |
| | TTATTATTAGATGATTTTGTTTCTATTGTTAAGTCATTAAATTTGAGTTGTGTTAGTAAAGTTGTTA |
| | ATATTAATGTTGATTTTAAGGATTTTCAATTTATGTTGTGGTGTAATGATAATAAAATTATGACTTT |
| | TTATCCTAAAATGCAAGCCACTAATGATTGGAAACCTGGCTATTCTATGCCTGTTTTGTATAAGTAT |
| | TTGAATGTTCCATTAGAGAGAGTCTCTTTATGGAATTATGGTAAACCTATTAATTTGCCTACAGGCT |
| | GTATGATGAATGTTGCTAAGTACACTCAATTATGTCAGTATTTGAATACTACAACATTAGCTGTTCC |
| | TGTTAATATGCGTGTTTTACATTTAGGTGCAGGGTCTGATAAAGAAGTAGCTCCAGGTTCTGCTGTT |
| | TTAAGACAGTGGTTACCATCTGGTAGTATTCTTGTAGATAATGATTTAAACCCATTTGTTAGCGATA |
| | GTTTAGTTACTTATTTTGGAGATTGTATGACTTTACCATTTGATTGTCATTGGGATTTGATAATATC |
| | TGATATGTATGATCCTCTTACTAAAAATATTGGTGATTATAATGTGAGTAAGGATGGGTTTTTTACT |
| | TACATTTGTCATTTAATTCGTGATAAATTATCTTTGGGTGGTAGTGTAGCTATAAAAATTACAGAGT |
| | TTTCTTGGAATGCTGATTTATATAAATTAATGAGTTGTTTTGCATTTTGGACAGTTTTTTGTACTAA |
| | TGTAAATGCTTCTTCTAGTGAAGGGTTTTTAATAGGTATAAATTACCTGGGTAAATCTTCTTTTGAA |
| | ATAGATGGCAATGTTATGCATGCTAACTATTTGTTTTGGAGAAATAGTACAACATGGAATGGCGGTG |
| | CTTATAGTTTATTTGATATGACTAAATTTTCTTTGAAATTGGCTGGCACTGCTGTTGTTAATTTAAG |
| | ACCAGATCAATTAAATGATTTAGTTTATTCTCTTATTGAAAGAGGTAAATTATTAGTTCGCGATACG |
| | CGTAAAGAGATTTTTGTTGGTGATAGTCTTGTAAATACTTGTTAGATCTCATTAAATCTAAACTATG |
| | TTAATTATTTTTTTATTTTTTTATTTCTGTTATGGTTTTAATGAACCTCTTAATGTTGTGTCTCATT |
| | TAAACCATGACTGGTTTTTATTTGGTGATAGTCGTTCTGATTGTAACCATATTAATAATTTAAAAAT |
| | TAAAAATTTTGATTATTTGGATATTCACCCTAGTTTGTGCAACAATGGTAAGATTTCATCTAGTGCC |
| | GGTGATTCTATTTTTAAGAGTTTTCATTTCACTCGATTTTATAATTACACTGGCGAAGGTGATCAAA |
| | TTATTTTTTATGAGGGTGTTAATTTTAATCCTTATCATAGATTTAAGTGTTTTCCTAATGGTAGTAA |
| | TGATGTATGGCTTCTTAACAAGGTAAGATTTTATCGTGCCTTATATTCTAATATGGCCTTTTTTCGT |
| | TATCTTACTTTTGTTGATATTCCTTATAATGTTTCTCTTTCTAAGTTTAATTCTTGTAAAAGTGATA |
| | TTTTATCACTTAACAATCCTATTTTTATTAATTATTCTAAGGAAGTTTATTTTACTTTATTAGGTTG |
| | TTCTCTTTATTTAGTACCGCTTTGCCTTTTTAAATCTAACTTTAGTCAGTACTATTATAACATAGAT |
| | ACTGGCTCTGTTTATGGTTTTTCTAATGTTGTTTATCCTGATTTAGACTGTATTTATATTTCTCTTA |
| | AACCAGGTTCTTATAAAGTTTCCACCACTGCACCTTTTTTATCCTTACCTACTAAAGCTCTCTGTTT |
| | TGATAAATCTAAACAATTTGTACCTGTACAGGTTGTTGATTCTAGATGGAACAACGAGCGTGCCTCA |
| | GATATTTCTTTATCTGTTGCATGTCAATTGCCATATTGTTATTTTCGCAATTCTTCTGCTAATTATG |
| | TTGGCAAGTATGATATTAACCACGGTGATAGTGGTTTTATTTCTATTTTATCTGGTCTTTTATATAA |
| | TGTTTCTTGTATTTCATATTATGGTGTATTTTTATATGATAATTTTACATCCATTTGGCCCTATTAT |
| | TCTTTTGGTAGGTGTCCTACATCTTCTATTATTAAACATCCAATTTGTGTTTATGATTTTTTGCCTA |
| | TTATTTTACAAGGTATTTTATTATGTTTAGCTTTACTTTTTGTTGTTTTTCTATTATTTTTGTTATA |
| | TAACGATAAATCTCATTAAATCTAAACATGTTATTAATTATTTTTATTTTGCCTACAACATTAGCTG |
| | TTATAGGTGATTTTAATTGTACTAATTTTGCTATTAATGATTTAAACACCACAGTTCCTCGCATAAG |
| | TGAGTATGTTGTGGATGTTTCTTATGGTTTGGGTACATATTATATACTTGATCGTGTTTATTTAAAT |
| | ACTACTATATTATTTACTGGTTATTTCCCTAAATCTGGTGCCAATTTTAGGGATCTATCTTTAAAAG |
| | GTACTACATATTTGAGTACTCTTTGGTATCAGAAACCCTTTTTATCTGATTTTAATAATGGTATTTT |
| | TTCTAGAGTTAAGAATACTAAGTTGTATGTTAATAAAACTTTGTATAGTGAGTTTAGTACTATAGTT |
| | ATAGGTAGTGTTTTTATTAACAACTCTTATACTATTGTTGTTCAACCTCATAATGGTGTTTTGGAGA |
| | TTACAGCTTGTCAATACACTATGTGTGAGTATCCTCATACTATTTGTAAATCTAAAGGTAGTTCTCG |
| | TAATGAATCTTGGCATTTTGATAAATCTGAACCTTTGTGTCTGTTCAAGAAAAATTTTACTTATAAT |
| | GTTTCTACAGATTGGTTGTATTTTCATTTTTATCAAGAACGTGGCACTTTTTATGCTTATTATGCTG |
| | ATTCTGGCATGCCTACTACTTTTTTATTTAGTTTGTATCTTGGTACTCTTTTATCTCATTATTATGT |
| | TTTGCCTTTGACTTGTAATGCTATATCTTCTAATACTGATAATGAGACTTTACAATATTGGGTCACA |
| | CCTTTGTCTAAACGCCAATATCTTCTTAAATTTGACAACCGTGGTGTTATTACTAATGCTGTTGATT |
| | GTTCTAGTAGTTTCTTTAGCGAGATTCAATGTAAAACTAAATCTTTATTACCTAATACTGGTGTTTA |
| | TGACTTATCTGGTTTTACTGTTAAGCCTGTTGCAACTGTACATCGTCGTATTCCTGATTTACCTGAT |
| | TGTGACATTGATAAATGGCTTAACAATTTTAATGTACCCTCACCTCTTAATTGGGAACGTAAAATTT |
| | TTTCTAATTGCAACTTTAATTTGAGTACTTTGCTTCGTTTAGTTCATACTGATTCTTTTTCTTGTAA |
| | TAATTTTGATGAATCTAAGATATATGGTAGTTGTTTTAAGAGTATTGTTTTAGATAAATTTGCCATA |
| | CCCAACTCCAGACGATCTGATTTGCAGTTGGGCAGTTCTGGTTTTCTGCAATCTTCTAATTATAAAA |
| | TTGACACTACTTCTAGTTCTTGTCAATTGTATTATAGTTTGCCTGCAATTAATGTTACTATTAATAA |
| | TTATAATCCTTCTTCTTGGAATAGAAGGTATGGTTTTAATAATTTTAATTTGAGCTCTCATAGTGTT |
| | GTTTACTCACGTTATTGTTTTTCTGTTAATAATACTTTTTGTCCTTGTGCTAAACCTTCTTTTGCTT |
| | CAAGTTGCAAGAGTCATAAACCACCTTCTGCTTCCTGTCCTATTGGTACTAATTATCGTTCTTGTGA |
| | GAGTACTACTGTACTCGACCACACTGACTGGTGTAGGTGTTCTTGTTTACCTGATCCTATAACTGCT |
| | TATGACCCTAGGTCTTGTTCTCAAAAAAAGTCTCTGGTTGGTGTTGGTGAACATTGTGCAGGGTTCG |
| | GTGTTGATGAAGAAAAGTGTGGTGTATTGGATGGATCATATAATGTTTCTTGTCTTTGTAGTACTGA |
| | TGCCTTTCTAGGTTGGTCTTATGACACTTGCGTCAGTAACAACCGTTGTAATATTTTTTCTAATTTT |
| | ATTTTAAATGGTATCAATAGTGGTACCACTTGTTCTAATGATTTATTGCAGCCTAATACTGAAGTTT |
| | TTACTGATGTTTGTGTTGATTACGACCTTTATGGTATTACAGGACAAGGTATTTTTAAAGAAGTTTC |
| | TGCTGTTTATTATAATAGTTGGCAAAATCTTTTGTATGATTCTAATGGCAACATTATTGGTTTTAAA |
| | GATTTTGTTACTAATAAAACATATAATATTTTCCCTTGTTATGCAGGAAGAGTTTCTGCTGCTTTTC |
| | ATCAAAATGCTTCCTCTTTGGCTTTACTTTATCGTAATTTAAAATGTAGCTATGTTTTGAATAATAT |
| | TTCTTTAACTACTCAGCCATATTTTGATAGTTATCTTGGTTGCGTTTTTAATGCTGATAATTTAACT |
| | GATTATTCTGTTTCTTCTTGTGCTCTTCGCATGGGTAGTGGTTTTTGTGTTGATTATAACTCACCTT |
| | CTTCTTCCTCTTCGCGTCGTAAACGTAGAAGTATTTCTGCTTCTTATCGTTTTGTTACTTTTGAACC |
| | CTTTAATGTCAGTTTTGTTAATGACAGTATTGAGTCTGTGGGTGGTCTTTATGAGATCAAAATTCCC |
| | ACTAACTTTACTATAGTTGGTCAAGAGGAATTTATTCAAACTAATTCTCCTAAAGTTACTATTGATT |
| | GTTCTTTATTTGTCTGTTCTAATTATGCAGCTTGCCATGACTTATTGTCAGAGTATGGCACTTTTTG |
| | TGATAATATTAATAGTATTTTAGATGAAGTTAATGGTTTACTTGATACTACTCAATTGCATGTAGCT |
| | GATACTCTTATGCAAGGTGTCACACTTAGCTCCAATCTTAATACTAATTTGCATTTTGATGTTGATA |
| | ATATTAATTTTAAATCCCTAGTTGGATGTTTAGGTCCACACTGCGGTTCTTCTTCTCGTTCTTTTTT |
| | TGAAGATTTATTGTTTGACAAAGTTAAACTTTCAGATGTTGGTTTTGTTGAAGCTTATAACAATTGT |
| | ACTGGTGGTAGTGAAATTAGAGATCTTCTTTGTGTACAATCCTTTAATGGTATTAAAGTTTTGCCTC |
| | CTATTTTGTCTGAATCTCAAATTTCTGGTTACACCACAGCCGCTACTGTTGCTGCTATGTTTCCACC |
| | ATGGTCAGCAGCAGCTGGCATACCATTTTCTCTTAATGTACAATATAGAATTAATGGTTTGGGTGTT |
| | ACTATGGATGTTCTTAATAAAAATCAAAAGTTGATAGCTACTGCTTTTAATAATGCTCTTCTTTCTA |
| | TTCAGAATGGTTTTAGTGCTACCAACTCTGCACTTGCTAAAATACAAAGTGTTGTTAATTCTAATGC |
| | TCAAGCACTTAATAGTTTGTTACAGCAATTATTTAATAAATTTGGTGCAATTAGTTCTTCTTTACAA |
| | GAAATTTTATCTCGTCTCGATGCTTTAGAGGCTCAGGTTCAGATTGATAGGCTTATTAATGGTCGTT |
| | TAACTGCTTTAAATGCTTATGTCTCTCAACAGCTTAGTGATATTTCTCTTGTAAAATTTGGTGCTGC |
| | TTTAGCTATGGAGAAGGTTAATGAGTGTGTTAAAAGTCAATCTCCTCGTATTAATTTTTGTGGTAAT |
| | GGTAATCATATTTTGTCATTAGTTCAAAATGCTCCTTATGGTTTGTTGTTTATGCATTTTAGTTATA |
| | AACCTATTTCTTTTAAAACTGTTTTAGTAAGTCCTGGTTTGTGTATATCAGGTGATGTAGGTATTGC |
| | ACCTAAACAAGGGTATTTTATTAAACATAATGATCATTGGATGTTCACTGGTAGTTCTTACTATTAT |
| | CCTGAACCAATTTCAGATAAAAATGTTGTTTTTATGAATACTTGTTCTGTTAATTTTACTAAAGCGC |
| | CTCTTGTTTATTTGAATCATTCTGTACCAAAATTGTCTGATTTTGAATCTGAGTTATCTCATTGGTT |
| | TAAAAATCAAACATCCATTGCGCCTAATTTGACTTTAAATCTTCATACTATTAATGCTACTTTTTTA |
| | GATTTGTATTATGAGATGAATCTTATTCAAGAGTCTATTAAGTCTTTGAATAATAGTTATATCAATC |
| | TTAAAGATATAGGTACATATGAAATGTATGTAAAATGGCCTTGGTATGTTTGGCTACTAATTTCTTT |
| | TTCATTTATAATATTCCTTGTATTGCTCTTTTTTATATGTTGTTGTACTGGTTGTGGTTCTGCATGT |
| | TTTAGTAAATGTCATAATTGTTGTGATGAGTATGGTGGTCATCATGATTTTGTTATCAAAACATCTC |
| | ATGATGATTAGAATCTCTTGTCAGATCTCATTAAATCTAAACTTTATTTATGGACGTTTGGAGACCT |
| | AGCTACACACATTCTCTTGTTATTAGAGAATTTGGTGTTACAAACCTTGAAGATTTGTGTCTAAAGT |
| | ATAATTACTGTCAACCTATTGTTGGTTACTGTATTGTACCTTTAAATGTTTGGTGTCGCAAGTTTGG |
| | CAAATTTGCTTCTCACTTTACATTACGTAGTCACGATATTTCCCATAGTAATAATTTTGGTGTTGTA |
| | ACTAGTTTTACTACTTATGGTAATACTGTTTCTGAGGCTGTGTCTAGATTAGTTGAATCAGCTTCTG |
| | AATTTATTGTTTGGCGTGCAGAGGCACTTAATAAGTATGGTTGATTTATTTTTCAATGATACTGCTT |
| | GGTACATAGGACAGATTTTAGTTTTAGTTTTATTTTGTCTTATTTCTTTAATCTTTGTTGTTGCTTT |
| | TTTAGCAACTATTAAGCTTTGTATGCAACTTTGTGGTTTTTGTAATTTCTTTATTATTTCACCTTCG |
| | GCTTACGTTTATAAAAGAGGTATGCAGTTGTATAAGTCTTATAGTGAACAAGTTATACCACCCACTT |
| | CAGATTATTTAATCTAAATCTAAACATTATGAATAAATCTTTTCTTCCTCAATTTACTTCTGATCAA |
| | GCTGTTACATTCTTAAAAGAATGGAATTTCTCTTTGGGTGTAATACTACTTTTTATTACTATCATAT |
| | TGCAGTTCGGTTATACGAGCCGTAGTATGTTTGTTTATCTTATCAAGATGATTATTCTTTGGCTTAT |
| | GTGGCCATTGACTATCACCTTGACTATATTTAATTGTTTTTATGCTTTGAATAATGCTTTTCTTGCA |
| | TTTTCTATAGTGTTTACTATTATTTCTATTGTTATATGGATTCTTTATTTTGTTAATAGTATTCGGC |
| | TTTTTATTAGAACTGGCAGTTGGTGGAGTTTTAATCCAGAGACCAATAATCTTATGTGTATTGATAT |
| | GAAAGGCAAGATGTTTGTTAGGCCAGTTATTGAGGACTATCACACATTAACTGCTACTGTTATTCGT |
| | GGTCATCTTTATATACAGGGTGTCAAACTTGGCACTGGTTATACTCTTTCAGATTTGCCCGTATATG |
| | TTACTGTAGCTAAGGTGCAAGTACTTTGTACCTATAAACGTGCCTTTTTAGATAAGTTAGATGTTAA |
| | TAGTGGTTTTGCTGTTTTTGTTAAGTCTAAAGTTGGTAACTATCGTTTACCGTCTAGTAAACCTAGT |
| | GGTATGGATACTGCCTTGTTAAGAGCTTAAATCTAAACTATTAGGATGTCTTATACTCCCGGTCATT |
| | ATGCTGGAAGTAGAAGCTCCTCTGGAAATCGTTCAGGAATCCTCAAGAAAACTTCTTGGGCTGACCA |
| | ATCTGAGCGAAATTACCAAACCTTTAATAGAGGCAGAAAAACCCAACCTAAATTCACTGTGTCTACT |
| | CAACCACAAGGAAATACTATCCCACATTATTCCTGGTTCTCCGGGATCACTCAATTTCAAAAAGGTA |
| | GAGACTTTAAATTTTCAGATGGTCAAGGAGTTCCCATTGCTTTCGGAGTACCCCCTTCTGAAGCAAA |
| | AGGATATTGGTATAGACACAGCCGGCGTTCTTTTAAAACAGCTGATGGTCAACAAAAGCAGTTGTTA |
| | CCGAGATGGTATTTCTACTATCTCGGTACCGGCCCATATGCCAATGCATCCTATGGTGAATCCCTCG |
| | AAGGGGTCTTCTGGGTTGCTAATCACCAAGCTGACACTTCTACTCCCTCCGATGTTTCGTCAAGGGA |
| | TCCTACTACTCAAGAAGCTATCCCTACTAGGTTTCCGCCTGGTACGATTTTGCCTCAAGGCTATTAT |
| | GTTGAAGGCTCAGGAAGGTCTGCTTCTAATAGTCGACCAGGTTCACGTTCTCAATCACGTGGACCCA |
| | ATAATCGTTCATTAAGTAGAAGTAATTCTAATTTTAGACATTCAGATTCTATAGTAAAACCTGATAT |
| | GGCTGATGAGATCGCTAATCTTGTTTTAGCCAAGCTTGGTAAAGATTCTAAACCTCAGCAAGTCACT |
| | AAGCAAAATGCCAAGGAAATCAGGCATAAAATTTTAACAAAACCTCGCCAAAAGCGAACTCCTAATA |
| | AACATTGTAATGTTCAACAGTGTTTTGGTAAAAGAGGACCTTCTCAAAATTTTGGTAATGCTGAAAT |
| | GTTAAAGCTTGGTACTAATGATCCTCAGTTTCCTATTCTTGCAGAATTAGCTCCTACACCAGGTGCT |
| | TTTTTCTTTGGTTCTAAATTAGACTTGGTTAAAAGAGATTCCGAGGCTGACTCACCTGTTAAAGATG |
| | TTTTTGAACTTCATTATTCTGGTTCTATTAGGTTTGATAGTACTTTACCAGGCTTTGAGACAATTAT |
| | GAAAGTTCTTGAAGAGAATTTAAATGCTTACGTTAATTCTAATCAGAACACTGATTCTGATTCGTTG |
| | AGTTCTAAACCTCAGCGTAAAAGAGGTGTTAAACAATTACCAGAACAGTTTGACTCTCTTAATTTAA |
| | GTGCTGGTACTCAGCACATTTCAAATGATTTTACTCCTGAGGATCATAGTTTACTTGCTACTCTTGA |
| | TGATCCTTATGTAGAAGACTCTGTTGCTTAATGAGAATGAATCCTAATTCGACACTAGGTGGTAACC |
| | CCTCGCTATTATTCGGAATAGGACACTCTCTATCAGAATGAATTCTTGCTGTAATAACAGATAGAGT |
| | AGGTTGTTACAGACTATATATTAATTAGTAGAAATTTTATATTTAGACATTTGATTGTTAGAGTAGT |
| | TATAAGGTTTAGCTGTAGTATAAACGCCTCCGGGAAGAGCTATCAATTGTAGTGTTTAATATATATA |
| | TTAGTATATGATTGAAATTAATTATAGCCTTTTGGAGGAATTAC |
| 7 | GenBank Accession No. MN306036.1 (Human coronavirus OC43 strain |
| | HCoV_OC43/Seattle/USA/SC0682/2019, complete genome) |
| | ATCTCTTGTTAGATCTTTTTGTAATCTAAACTTTATAAAAACATCCACTCCCTGTAATCTATGCNTG |
| | TGGGCGTAGATTTTTCATAGTGGTGTTTATATTCATTTCTGCTGTTAACAGCTTTCAGCCAGGGACG |
| | TGTTGTATCCTAGGCAGTGGCCCTCCCATAGGTCACAATGTCGAAGATCAACAAATACGGTCTCGAA |
| | CTACACTGGGCTCCAGAATTTCCATGGATGTTTGAGGACGCAGAGGAGAAGTTGGACAACCCTAGTA |
| | GTTCAGAGGTGGATATGATTTGCTCCACCACTGCGCAAAAGCTGGAAACAGACGGAATTTGTCCTGA |
| | AAATCATGTGATGGTGGATTGTCGCCGACTTCTTAAACAAGAGTGTTGTGTGCAGTCTAGCCTAATA |
| | CGTGAAATTGTTATGAATGCAAGTCCATATTATTTGGAGGTGCTACTTCAAGATGCTTTGCAGTCCC |
| | GTGAAGCAGTTTTGGTTACAACCCCCTTAGGTATGTCCTTAGAGGCATGCTATGTGAGAGGTTGTAA |
| | TCCTAAAGGATGGACCATGGGTTTGTTTCGGCGTAGAAGTGTGTGTAACACTGGTCGTTGCACTGTT |
| | AATAAGCATGTGGCCTATCAGTTATATATGATTGATCCTACGGGTGTCTGTCTTGGTGCAGGTCAAT |
| | TCGTGGGTTGGGTCATACCCTTAGCCTTTATGCCTGTGCAATCCCGGAAATTTATTGTTCCATGGGT |
| | TATGTACTTGCGTAAGCGTGGCGAAAAGGGTGCTTATAATAAAGATCATGGATGTGGCGGTTTTGGA |
| | CATGTTTATGATTTTAAAGTTGAAGATGCTTATGACCAGGTGCATGATGAGCCTAAGGGTAAGTTTT |
| | CTAAGAAGGCTTATGCTTTAATTAGAGGGTATCGTGGTGTTAAACCACTTCTCTATGTAGACCAGTA |
| | TGGTTGTGATTATACTGGTAGTCTTGCAGATGGCTTAGAGGCTTATGCTGATAAGACATTGCAAGAA |
| | ATGAAGGCATTATTTCCTACTTGGAGTCAGGAACTCCCTTTTGATGTAATTGTGGCATGGCATGTTG |
| | TGCGTGATCCACGTTATGTTATGAGATTGCAGAGTGCTGCTACTATATGTAGTGTTGCATATGTTGC |
| | TAATCCTACTGAAGACTTGTGTGATGGTTCTGTTGTTATAAAAGAACCTGTGCATGTTTATGCAGAT |
| | GACTCTATTATTTTACGTCAATATAATTTATTTGACATTATGAGTCATTTTTATATGGAGGCAGATA |
| | CAGTTGTAAATGCTTTTTATGGTGTTGCTTTGAAAGATTGTGGTTTTGTTATGCAGTTTGGTTACAT |
| | TGATTGCGAACAAGACTTGTGTGATTTTAAAGGTTGGATTCCTGGTAACATGATAGATGGTTTTGCT |
| | TGCACCACTTGTGGTCATGTTTATGAAGTAGGTGATTTGATAGCACAATCTTCAGGTGTTTTGCCTG |
| | TTAACCCTGTATTGCATACTAAGAGTGCAGCAGGTTATGGTGGTTTTGGTTGTAAAGATTCTTTTAC |
| | TCTGTATGGCCAAACTGTAGTTTATTTTGGAGGTTGTGTGTATTGGAGTCCAGCACGTAATATATGG |
| | ATTCCTATATTAAAATCCTCTGTTAAGTCATATGACAGTTTGGTTTATACTGGAGTTTTAGGTTGCA |
| | AGGCTATTGTAAAGGAAACAAATCTCATTTGCAAAGCTCTGTACCTTGATTATGTTCAACACAAGTG |
| | TGGCAATTTACACCAACGGGAGTTGCTAGGTGTTTCAGATGTGTGGCATAAACAATTGCTAATAAAT |
| | AGAGGTGTTTATAAACCTCTGTTAGAGAATATTGATTATTTTAATATGCGACGCGCTAAATTTAGTT |
| | TAGAAACTTTTACTGTTTGTGCAGATGGCTTTATGCCTTTTCTTTTAGATGATTTAGTTCCACGCGC |
| | ATATTATTTGGCAGTAAGTGGTCAAGCATTTTGTGATTATGCAGATAAACTTTGCCATGCTGTTGTG |
| | TCTAAGAGTAAAGAGTTACTTGATGTGTCTCTGGATTCTTTAGGTGCAGCTATACATTATTTGAATT |
| | CTAAGATTGTTGATTTGGCTCAACATTTTAGTGATTTTGGAACAAGTTTTGTTTCTAAAATTGTTCA |
| | TTTCTTTAAGACTTTTACTACTAGCACTGCTCTTGCATTTGCATGGGTTTTATTTCATGTTTTGCAT |
| | GGTGCTTATATAGTAGTGGAGAGTGATATATATTTTGTTAAAAACATTCCTCGTTATGCTAGTGCTG |
| | TTGCACAAGCATTTCAGAGTGTTGCTAAAGTTGTACTGGACTCTTTAAGAGTTACTTTTATTGATGG |
| | CCTTTCTTGTTTTAAGATTGGACGTAGAAGAATTTGTCTTTCAGGCAGAAAAATTTATGAAGTTGCG |
| | CGTGGCTTGTTACATTCATCCCAATTGCCATTAGATGTTTATGATTTAACCATGCCTAGTCAAGTTC |
| | AGAAAGCCAAGCAAAAACCTATCTATTTAAAAGGTTCTGGTTCTGATTTTTCATTAGCGGATAGTGT |
| | AGTTGAAGTTGTTACAACTTCACTTACACCATGTGGCTATTCTGAACCACCTAAAGTTGCAGATAAA |
| | ATTTGCATTGTGGATAATGTTTATATGGCCAAGGCTGGTGATAAATATTACCCTGTCGTGGTTGATG |
| | ATCATGTTGGACTTTTGGATCAAGCATGGAGAGTTCCTTGTGCTGGACGGCGTGTTACATTTAAGGA |
| | ACAGCCTACAGTAAAGGAGATTATAAGCATGCCTAAGATTATTAAGGTTTTTTATGAGCTTGACAAT |
| | GATTTTAATACTATTTTAAATACTGCGTGTGGAGTGTTTGAAGTGGATGATACTGTCGATATGGAGG |
| | AATTTTATGCTGTGGTGATTGATGCCATAGAAGAGAAACTTTCTCCATGTAAGGAGCTTGAAGGTGT |
| | AGGTGCTAAAGTTAGTGCCTTTTTACAGAAATTAGAGGATAATCCCCTATTTTTATTTGATGAGGCT |
| | GGCGAAGAAGTTTTTGCTCCTAAATTGTATTGTGCCTTTACAGCTCCTGAAGATGATGACTTTCTTG |
| | AGGAAAGTGATGTTGAAGAAGATGATGTAGAAGGTGAGGAAACTGATTTAACTATCACAAGTGCTGG |
| | ACGGCCTTGTGTTGCTAGTGAACAGGAGGAATCTTCTGAAGTCTTAGAGGACACTTTGGATGATGGT |
| | CCAAGTGTGGAGACATCTGATTCACAAGTTGAAGAAGATGTAGAAATGTCGGATTTTGTTGATCTTG |
| | AATCTGTGATTCAGGATTATGAAAATGTTTGTTTTGAGTTTTATACTACAGAGCCAGAATTTGTTAA |
| | AGTTTTGGGTCTGTATGTGCCTAAAGCAACTCGCAACAATTGCTGGTTGCGATCAGTTTTGGCAGTG |
| | ATGCAGAAATTGCCCTGTCAATTTAAAGATAAAAATTTGCAGGATCTTTGGGTGTTATACAAGCAAC |
| | AGTATAGTCAGTTGTTTGTTGATACCTTGGTTAATAAGATACCTGCTAATATTGTACTTCCACAAGG |
| | TGGTTATGTTGCTGATTTTGCATATTGGTTTTTAACCTTATGTGATTGGCAGTGTGTTGCATACTGG |
| | AAATGCATTAAATGTGATTTAGCTCTTAAGCTTAAAGGCTTGGATGCTATGTTCTTTTATGGTGATG |
| | TTGTCTCACATATATGCAAGTGTGGTGAGTCTATGGTACTTATTGATGTTGATGTGCCATTTACAGT |
| | CCACTTTGCTCTTAAAGATAAGTTGTTTTGTGCATTTATTACTAAGCGTATTGTGTATAAAGCAGCT |
| | TGTGTTGTGGATGTTAATGATAGTCATTCTATGGCTGTTGTTGATGGTAAACAAATTGATGATCATC |
| | GTATCACTAGTATTACTAGTGATAAGTTTGATTTTATTATTGGGCATGGTATGTCATTTTCAATGAC |
| | TACTTTTGAAATTGCCCAATTGTATGGTTCTTGTATAACACCTAATGTGTGTTTTGTTAAAGGTGAT |
| | ATAATTAAAGTGTCTAAGCTTGTTAAAGCAGAAGTTGTTGTAAACCCTGCTAATGGCCATATGGTAC |
| | ATGGTGGTGGTGTTGCAAAAGCTATTGCAGTAGCAGCTGGACAGCAGTTTGTTAAAGAGACTACCAA |
| | TATGGTTAAGTCTAAAGGAGTTTGTGCTACTGGAGATTGTTATGTCTCTACAGGGGGCAAATTATGT |
| | AAAACTGTGCTTAATGTTGTTGGACCTGATGCGAGAACACAGGGTAAACAAAGTTATGTATTGTTAG |
| | AGCGTGTTTATAAACATTTTAACAACTATGACTGTGTTGTTACAACTTTGATCTCAGCTGGTATATT |
| | TAGTGTGCCTTCTGATGTGTCTTTAACATATCTACTTGGTACTGCTAAGAAACAAGTTGTTCTTGTT |
| | AGCAATAATCAAGAGGATTTTGATCTTATTTCTAAGTGTCAGATAACTGCTGTTGAGGGCACTAAGA |
| | AATTGGCAGCGCGTCTTTCCTTTAATGTTGGACGTTCCATTGTTTACGAAACAGATGCTAATAAGTT |
| | GATTTTAATCAATGATGTTGCATTTGTTTCGACATTTAATGTTTTACAGGATGTTTTATCCTTAAGA |
| | CATGATATAGCACTTGATGATGATGCACGAACCTTTGTTCAGAGCAATGTTGATGTTCTACCTGAGG |
| | GTTGGCGTGTTGTCAATAAGTTTTATCAAATTAATGGTGTTAGAACCGTTAAGTATTTTGAGTGTAC |
| | TGGAGGCATAGATATATGCAGCCAGGATAAAGTTTTTGGTTATGTACAGCAGGGTATTTTTAATAAG |
| | GCTACTGTTGCTCAAATTAAAGCCTTGTTTTTGGATAAAGTGGACATCTTGCTAACTGTTGATGGTG |
| | TTAATTTCACTAATAGGTTTGTGCCTGTTGGTGAAAGTTTTGGTAAGAGTCTAGGAAATGTGTTTTG |
| | TGATGGAGTTAATGTCACGAAGCATAAGTGTGATATAAATTATAAAGGTAAAGTCTTTTTCCAGTTT |
| | GATAATCTTTCTAGTGAAGATTTAAAGGCTGTAAGAAGTTCCTTTAATTTTGATCAGAAGGAATTGC |
| | TTGCCTATTACAACATGCTTGTTAATTGTTTTAAGTGGCAGGTTGTTGTTAATGGTAAGTATTTCAC |
| | TTTTAAGCAAGCTAATAACAATTGTTTTGTTAATGTTTCTTGCTTAATGCTCCAGAGCTTGCATCTG |
| | ACATTTAAAATTGTTCAATGGCAAGAGGCATGGCTTGAATTTCGTTCTGGCCGCCCTGCTAGATTTG |
| | TAGCTTTGGTTTTGGCCAAAGGTGGGTTTAAATTTGGAGATCCTGCTGATTCTAGAGATTTCTTGCG |
| | TGTTGTGTTTAGTCAAGTTGATTTGACTGGGGCAATATGTGATTTTGAAATTGCATGTAAATGTGGT |
| | GTAAAGCAGGAACAGCGTACTGGTCTAGATGCTGTTATGCATTTTGGTACATTGAGTCGTGAAGATC |
| | TTGAGATTGGTTATACCGTGGACTGTTCTTGCGGTAAAAAGCTAATTCATTGTGTACGATTTGATGT |
| | ACCATTTTTAATTTGCAGTAATACACCTGCTAGTGTAAAATTACCTAAGGGTGTAGGAAGTGCAAAT |
| | ATTTTTATAGGTGATAATGTTGGTCATTATGTTCATGTTAAGTGTGAACAATCTTATCAGCTTTATG |
| | ATGCTTCTAATGTTAAGAAGGTTACAGATGTTACTGGCAAATTGTCAGATTGTCTGTATCTTAAAAA |
| | TTTGAAACAAACTTTTAAATCTGTGTTAACCACCTATTATTNNNNNNNNNNNNNGAAAATTGAGTAT |
| | AAACCTGACTTGTCACAATACTATTGNNNNNNNNNNNNNNNNNNNNNNNNNNNNNNNATTAAAGCCC |
| | AATTTAAAACATTCGAGAAAGTAGATGGTGTGTATACTAATTTTAAATTGATAGGACACACCGTCTG |
| | TGACAGTCTTAATTCTAAGTTGGGTTTTGATAGCTCTAAAGAGTTTGTTGAATATAAGATTACTGAG |
| | TGGCCAACAGCTACAGGTGATGTGGTGTTGGCTAATGATGATTTGTATGTTAAGAGATATGAGAGGG |
| | GTTGTATTACTTTTGGTAAACCTGTTATATGGTTAAGCCATGAGAAAGCTTCTCTCAATTCTTTAAC |
| | ATATTTTAATAGACCTTTATTGGTTGATGATAATAAATTTGATGTTTTAAAAGTGGATGATGTTGAT |
| | GATAGTGGTGACAGCTCAGAGAGTGGTGCCAAAGAAACCAAAGAAATCAACATTATTAAGTTAAGTG |
| | GTGTTAAAAAACCATTTAAGGTTGAAGATAGTGTCATTGTTAACGATGATACTAGTGAAACCAAATA |
| | CGTTAAGAGTTTGTCTATTGTTGATGTGTATGATATGTGGCTTACAGGTTGTAAGTATGTTGTTAGA |
| | ACTGCTAATGCTTTGAGCAGAGCAGTTAACGTACCTACAATACGTAAGTTTATAAAATTTGGTATGA |
| | CTCTTGTTAGTATACCAATTGATTTGTTAAATTTAAGAGAGATTAAGCCTGCTGTTAATGTGGTTAA |
| | AGCTGTGCGAAATAAAACTTCTGCATGCTTTAATTTTATTAAATGGCTTTTTGTCTTATTATTTGGC |
| | TGGATTAAAATATCCGCTGATAATAAAGNAATCTACACCACAGAAATTGCATCAAAGCTTACGTGTA |
| | AGCTTGTAGCTTTAGCTTTTAAAAATGCATTTTTGACATTTAAGTGGAGTATGGTTGCTAGAGGTGC |
| | TTGCATTATAGCGACTATATTTCTATTGTGGTTTAATTTTATATATGCCAATGTAATTTTTAGTGAT |
| | TTTTATTTGCCTAAAATCGGTTTCTTGCCGACTTTTGTTGGTAAGATTGCACAGTGGATTAAGAACA |
| | CTTTTAGTCTTGTAACTATTTGTGATCTATATTCCATTCAGGATGTGGGTTTTAAGAATCAGTATTG |
| | TAATGGAAGTATTGCATGTCAGTTCTGCTTGGCAGGATTTGATATGTTAGATAATTATAAAGCCATT |
| | GATGTAGTACAGTATGAAGCTGATAGGAGAGCATTTGTTGATTATACAGGTGTGTTAAAGATTGTCA |
| | TTGAATTGATAGTAAGTTATGCCCTGTATACGGCATGGTTTTATCCATTGTTTGCCCTTATCAGTAT |
| | TCAGATTTTGACCACTTGGCTGCCTGAGCTTTTTATGCTTAGTACATTACATTGGAGTTTTAGGTTG |
| | TTGGTGGCTTTAGCTAATATGTTACCAGCACATGTGTTTATGAGGTTTTATATTATTATTGCCTCTT |
| | TTATTAAGCTCTTTAGCTTGTTTAAGCATGTTGCTTATGGTTGTAGTAAATCTGGTTGTTTGTTTTG |
| | TTACAAGAGGAATCGTAGTCTACGTGTTAAATGTAGTACTATCGTTGGTGGCATGATACGCTATTAC |
| | GATGTTATGGCTAATGGTGGCACTGGCTTTTGTTCAAAACATCAATGGAATTGCATTGATTGTGATT |
| | CTTATAAACCAGGTAATACTTTTATTACTGTTGAGGCCGCTCTTGATCTATCTAAGGAATTGAAACG |
| | GCCCATTCAGCCTACAGATGTTGCTTATCACACGGTTACTGATGTTAAGCAAGTTGGTTGTTCTATG |
| | CGCTTGTTCTATGATCGTGATGGACAGCGCATATATGATGATGTTAATGCTAGTTTGTTTGTGGATT |
| | NTAGTAATTTGCTACATTCTAAGGTTAAGAGTGTGCCTAATATGCATGTTGTGGTAGTGGAAAATGA |
| | TGCTGATAAAGCCAATTTTCTGAATGCTGCTGTATTTTATGCACAGTCTTTGTTTAGACCTATTTTA |
| | ATGGTTGATAAAAATCTGATAACTACTGCTAACACTGGTACGTCTGTTACAGAAACTATGTTTGATG |
| | TTTATGTGGATACATTTTTGTCTATGTTTGATGTGGATAAAAAGAGTCTTAATGCTTTAATAGCAAC |
| | TGCGCATTCTTCTATAAAACAGGGTACGCAGATTTATAAAGTTTTGGATACCTTTTTAAGCTGTGCT |
| | CGTAAAAGTTGTTCTATTGATTCAGATGTTGATACTAAGTGTTTAGCTGATTCTGTCATGTCTGCTG |
| | TATCGTCAGGTCTCGAATTGACGGATGAAAGTTGTAATAACTTGGTGCCAACATATTTGAAGAGTGA |
| | CAACATTGTAGCAGCTGATTTAGGTGTTCTGATTCAAAATTCTGCAAAGCATGTGCAGGGTAATGTT |
| | GCTAAAATAGCTGGTGTTTCCTGTATATGGTCTGTGGATGCTTTTAATCAGTTTAGTTCTGATTTCC |
| | AGCATAAATTGAAGAAAGCATGTTGTAAAACTGGTTTGAAACTGAAGCTTACTTATAATAAGCAGAT |
| | GGCTAATGTCTCTGTTTTAACTACACCCTTTAGTCTTAAAGGGGGTGCAGTTTTTAGTTATTTTGTT |
| | TATGTGTGTTTTGTGTTGAGTTTGGTCTGTTTTATTGGACTGTGGTGCTTAATGCCCACTTACACAG |
| | TACACAAATCAGATTTTCAGCTTCCTGTTTATGCCAGTTATAAAGTTTTAGATAATGGTGTTATTAG |
| | AGATGTTAGCGTTGAAGATGTTTGTTTCGCTAACAAATTTGAGCAATTTGATCAATGGTATGAGTCT |
| | ACATTTGGTCTAAGTTATTATAGTAACAGTATGGCTTGTCCCATTGTTGTTGCTGTAATAGATCAGG |
| | ATTTTGGCTCTACAGTGTTTAATGTCCCTACCAAAGTGTTACGATATGGTTATCATGTGTTGCACTT |
| | TATTACACATGCACTTTCTGCTGATGGAGTGCAGTGTTATACTCCACATAGTCAAATATCGTATTCT |
| | AATTTTTATGCTAGTGGCTGTGTGCTTTCCTCTGCTTGCACTATGTTTACAATGGCCGATGGTAGTC |
| | CACAACCTTATTGTTATACAGATGGGCTTATGCAAAATGCTTCTCTGTATAGTTCATTGGTACCTCA |
| | CGTGCGGTATAATCTTGCTAATGCTAAAGGTTTTATCCGTTTTCCAGAAGTGTTGCGAGAAGGGCTT |
| | GTACGTGTCGTGCGTACTCGTTCTATGTCGTATTGCAGAGTTGGATTATGTGAGGAAGCTGATGAGG |
| | GTATATGCTTTAATTTTAATGGTTCTTGGGTGCTTAATAATGATTATTATAGATCATTGCCTGGGAC |
| | CTTTTGTGGTAGAGATGTTTTTGATTTAATTTATCAGCTATTTAAAGGTTTAGCACAGCCTGTGGAT |
| | TTTTTGGCATTGACTGCTAGTTCCATTGCTGGTGCTATACTCGCTGTAATTGTTGTTTTGGTGTTTT |
| | ATTACCTAATAAAGCTTAAACGTGCTTTTGGTGATTACACCAGTGTTGTTTTTGTTAATGTGATTGT |
| | GTGGTGTGTAAATTTTATGATGCTTTTTGTGTTTCAAGTTTACCCCACACTTTCTTGTGTATATGCT |
| | ATTTGTTATTTTTATGCCACGCTTTATTTCCCTTCGGAGATAAGTGTGATAATGCACTTACAATGGC |
| | TAGTTATGTATGGCACTATTATGCCTTTATGGTTTTGTTTGCTATATATAGCTGTTGTTGTTTCAAA |
| | TCATGCTTTTTGGGTATTTTCTTACTGCAGAAAGCTTGGTACTTCTGTTCGTAGTGATGGTACATTT |
| | GAAGAAATGGCTCTCACTACTTTTATGATTACAAAAGATTCTTATTGTAAGCTTAAGAATTCTTTGT |
| | CTGATGTTGCTTTTAATNNNNNNNNNNNNNNGTATAATAAATATAGGTATTACAGCGGTAAAATGGA |
| | CACTGCTGCATATAGGGAGGCTGCTTGCTCTCAGTTGGCTAAAGCAATGGACACATTTACCAATAAT |
| | AATGGTAGTGATGTGCTTTACCAACCGCCTACTGCTTCCGTTTCAACTTCATTCTTGCAATCCGGTA |
| | TTGTGAAAATGGTAAATCCTACTTCTAAGGTAGAACCATGTGTTGTCAGTGTTACCTATGGTAATAT |
| | GACATTGAATGGTTTATGGTTGGATGACAAGGTCTACTGTCCCAGACATGTAATATGTTCTGCTTCA |
| | GATATGACTAATCCAGATTATACAAATTTGTTGTGTAGAGTAACATCAAGTGATTTTACTGTATTGT |
| | TTGATCGTTTAAGCCTTACAGTGATGTCTTATCAAATGCGGGGTTGTATGCTTGTTCTTACAGTGAC |
| | CCTGCAAAATTCTCGTACGCCAAAATATACATTTGGTGTGGTTAAACCTGGTGATACTTTTACTGTT |
| | TTAGCTGCTTATAACGGCAAACCACAAGGAGCCTTTCATGTAACTATGCGTAGTAGTTATACCATTA |
| | AGGGTTCCTTTTTATGCGGATCTTGTGGATCTGTTGGTTATGTAATAATGGGTGATTGTGTTAAATT |
| | TGTTTATATGCATCAATTGGAGCTTAGTACTGGTTGTCATACTGGTACTGACTTCAATGGGGATTTT |
| | TATGGTCCTTATAAGGATGCTCAGGTTGTTCAGTTGCCCATTCAGGATTATATACAATCTGTTAATT |
| | TTTTAGCATGGCTTTATGCTGCTATACTTAACAATTGTAATTGGTTTATACAAAGTGATAAGNNNNC |
| | TGTAGAAGATTTTAATGTGTGGGCTCTGTCCAATGGATTTAGCCAAGTTAAATCTGACCTTGTTATA |
| | GATGCTTTAGCTTCTATGACTGGTGTGTCTTTGGAAACACTGTTGGCTGCTATTAAGCGTCTTAAGA |
| | ATGGTTTCCAAGGACGTCAGATTATGGGTAGTTGCTCTTTTGAGGATGAATTGACACCTAGCGATGT |
| | TTATCAACAACTCGCTGGTATCAAGTTACAATCAAAACGCACTAGATTGTTTAAAGGTACTGTTTGT |
| | TGGATTATGGCTTCTACATTTTTGTTTAGTTGCATAATTACAGCATTTGTGAAATGGACTATGTTCA |
| | TGTATGTAACTACTAATATGTTTAGTATTACGTTTTGTGCACTTTGTGTTATAAGTTTGGCCATGTT |
| | GTTGGTTAAGCANNNNNNNNNNNNNNNNNNNATGTATATAACACCTGTGCTTTTTACATTGTTGTAT |
| | AACAACTATTTGGTTGTGTACAAGCATACATTTAGAGGCTATGTTTATGCATGGCTATCGTATTATG |
| | TTCCATCAGTTGAGTACACTTATACTGATGAAGTTATTTATGGCATGTTATTGCTTGTAGGAATGGT |
| | CTTTGTTACATTACGTAGCATTAACCATGATTTGTTTTCTTTTATAATGTTTGTTGGTCGTTTGATT |
| | TCTGTTTTCTCTTTGTGGTACAAGGGTTCTAACTTAGAGGAAGAAATTCTTCTTATGTTGGCTTCCC |
| | TTTTTGGTACTTACACATGGACAACAGTTTTATCTATGGCTGTAGCAAAGGTTATTGCTAAGTGGGT |
| | TGCTGTGAATGTCTTGTATTTCACAGATATACCTCAAATTAAGATAGTGCTTTTGTGCTATTTGTTT |
| | ATTGGTTATATTATTAGCTGTTATTGGGGTTTGTTTTCCTTGATGAACAGTTTGTTTAGAATGCCTT |
| | TGGGTGTTTATAATTATAAAATTTCAGTACAGGAATTAAGATATATGAATGCTAATGGATTGCGCCC |
| | TCCTAAGAATAGTTTTGAAGCCCTTATGCTTAATTTTAAGCTGTTGGGTATTGGAGGTGTTCCAATC |
| | ATTGAAGTATCTCAATTTCAATCAAAATTGACTGATGTCAAATGTGCTAATGTCGTCTTGCTTAATT |
| | GCTTGCAACATTTGCATGTTGCTTCTAATTCTAAGTTGTGGCATTATTGTAGCACTTTGCACAATGA |
| | AATACTTGCCACTTCGGATCTGAGTGTTGCTTTTGAAAAGCTTGCTCAGTTATTAATTGTTTTGTTT |
| | GCTAATCCAGCTGCTGTGGATAGCAAGTGCCTGACTAGTATTGAAGGAGTTTGCGATGATTACGCAA |
| | AGGACAATACTGTTTTGCAGGCTTTACAGAGTGAATTTGTTAATATGGCTAGCTTCGTTGAATATGA |
| | AGTTGCTAAGAAAAATCTTGATGAGGCGCGTTTTAGTGGTTCTGCTAATCAACAGCAGTTAAAACAG |
| | CTAGAGAAAGCCTGTAATATTGCTAAATCTGCTTATGAACGCGACCGTGCTGTAGCAAAAAAGTTGG |
| | AGCGTATGGCTGATTTAGCTCTTACTAATATGTATAAAGAAGCTAGAATTAATGATAAGAAGAGTAA |
| | GGTTGTTTCTGCCTTGCAAACTATGCTTTTTAGTATGGTGCGTAAGTTAGATAATCAAGCTCTGAAT |
| | TCAATATTAGATAACGCTGTGAAGGGTTGTGTACCATTGAATGCAATACCTTCATTGGCAGCAAATA |
| | CTCTGAATATAATTGTACCAGATAAAAGTGTTTATGACCAGATAGTTGATAATATCTATGTTACCTA |
| | TGCTGGTAATGTATGGCAGATTCAAACTATCCAGGATTCAGATGGTACAAATAAGCAGTTGAATGAG |
| | ATATCTGATGATTGTAACTGGCCACTAGTTATTATTGCAAATCGGTATAATGAGGTACCTGCTACTG |
| | TTTTGCAAAATAATGAATTAATGCCTGCTAAGTTGAAAATTCAGGTTGTTAATAGTGGTCCAGATCA |
| | GACTTGTAATACACCTACTCAATGTTACTATAATAATAGTAACAATGGTAAGATTGTTTATGCTATN |
| | NNNNNNNNNNNNNNNNGTCTTAAGTATACAAAAATTCTTAAAGATGATGGCAATTTTGTTGTTTTGG |
| | AGTTAGATCCTCCTTGTAAATTTACTGTTCAAGATGCTAAAGGTCTTAAAATTAAGTACCTTTATTT |
| | TGTAAAAGGTTGTAACACACTAGCAAGAGGCTGGGTTGTTGGTACAATTTCTTCTACAGTTAGATTG |
| | CAAGCTGGAACTGCTACTGAATATGCTTCCAACTCATCTATATTGTCTTTATGTGCGTTTTCTGTAG |
| | ATCCTAAGAAAACGTATTTAGATTTTATACAACAAGGAGGTACACCTATTGCCAATTGTGTTAAAAT |
| | GTTGTGTGACCATGCTGGTACCGGTATGGCCATTACTGTTAAACCCGATGCTACCACTAGTCAGGAT |
| | TCATATGGTGGTGCGTCTGTTTGTATATATTGCCGCGCACGAGTTGAACACCCAGATGTTGATGGGT |
| | TGTGCAAATTACGCGGCAAGTTTGTACAAGTGCCTGTAGGTATAAAAGATCCTGTGTCTTATGTTTT |
| | GACACATGATGTTTGTCGAGTTTGTGGATTTTGGCGGGATGGAAGTTGTTCATGTGTTAGCACTGAC |
| | ACTACTGTTCAATCAAAAGATACTAATTTTTTAAACGCGTTCGGGGTGCGAGTGTAGATGCCCGTCT |
| | CGTACCCTGCGCCAGTGGTTTATCTACTGATGTACAATTAAGGGCATTTGATATTTACAATGCTAGT |
| | GTTGCTGGCATTGGTTTACATTTAAAAGTTAATTGTTGCCGTTTTCAGCGTGTTGATGAGAACGGTG |
| | ATAAATTAGATCAGTTCTTTGTTGTTAAGAGGACAGATCTGACTATATATAATAGAGAGATGAAATG |
| | CTATGAGCGTGTAAAAGATTGTAAGTTTGTGGCTGAACACGATTTCTTTACATTTGATGTAGAAGGT |
| | AGTCGTGTGCCACACATTGTACGCAAGGATTTAACAAAGTATACTATGTTGGATCTTTGCTATGCAT |
| | TGCGACATTTTGATCGCAATGATTGCATGCTGCTTTGTGACATTCTCTCTATATATGCTGGTTGTGA |
| | ACAATCCTATTTTACTAAGAAGGATTGGTATGATTTTGTTGAAAATCCTGATATTATTAATGTGTAT |
| | AAAAAGCTAGGACCTATTTTTAATAGAGCCCTAGTTAGCGCTACTGAGTTTGCGGACAAATTGGTGG |
| | AGGTAGGCTTAGTAGGCGTTTTAACACTTGATAATCAAGATTTAAATGGTAAATGGTATGATTTTGG |
| | TGACTATGTTATTGCAGCCCCAGGATGTGGTGTTGCTATAGCAGATTCTTATTATTCTTATATCATG |
| | CCTATGCTGACCATGTGTCATGCATTGGATTGTGAATTGTATGTGAATAATGCTTATAGACTATTTG |
| | ATCTTGTACAGTATGATTTTACTGATTACAAGCTTGAATTGTTTAATAAGTATTTTAAGCACTGGAG |
| | TATGCCATATCATCCTAACACGGTTGATTGTCAGGATGATCGGTGTATTATACATTGTGCTAATTTT |
| | AACATACTTTTTAGTATGGTTTTACCTAATACATGTTTTGGGCCTCTTGTTAGGCAAATTTTTGTGG |
| | ATGGTGTGCCTTTTGTTGTTTCAATTGGCTACCATTATAAAGAACTTGGTATTGTGATGAATATGGA |
| | TGTGGATACACATCGTTATCGCTTGTCTTTAAAAGACTTGCTTTTATATGCTGCTGATCCAGCTTTG |
| | CATGTAGCTTCTGCTAGTGCATTGTATGATTTACGCACTTGCTGTTTTAGTGTTGCCGCTATAACAA |
| | GCGGTGTAAAATTTCAAACAGTTAAACCTGGTAATTTTAATCAGGATTTTTATGATTTTGTTTTAAG |
| | TAAAGGCCTGCTTAAAGAGGGTAGCCCAGTTGATCTGAAGCACTTTTTCTTTACACAGGATGGTAAT |
| | GCTGCTATTACTGATTATAATTATTATAAGTATAATTTGCCCACCATGGTGGACATTAAGCAGTTGT |
| | TGTTTGTTTTGGAAGTTGTTTATAAGTATTTTGAGATTTATGATGGTGGTTGTATACCGGCATCACA |
| | AGTCATTGTTAATAATTATGATAAGAGTGCTGGCTATCCATTTAACAAATTTGGAAAAGCCAGGCTC |
| | TATTATGAAGCATTATCATTTGAGGAACAGGATGAAATTTACGCTTATACTAAGCGTAATGTCCTGC |
| | CAACACTTACTCAAATGAATTTGAAATATGCTATTAGTGCTAAGAATAGAGCCCGCACTGTTGCTGG |
| | TGTTTCCATACTTAGTACTATGACTGGCAGAATGTTTCATCAAAAATGTTTGAAAAGTATAGCAGCT |
| | ACACGTGGTGTTCCTGTAGTTATAGGCACCACTAAATTTTATGGTGGCTGGGATGATATGTTACGCC |
| | GCCTTATTAAAGATGTCGACAATCCTGTTCTTATGGGTTGGGATTATCCTAAGTGTGATCGTGCTAT |
| | GCCAAACATACTACGTATTGTTAGTAGTTTGGTATTAGCCCGAAAACATGAGACATGTTGTTCGCAA |
| | AGCGATAGGTTTTATCGACTTGCGAATGAATGCGCACAAGTTTTGAGTGAAATTGTTATGTGTGGTG |
| | GCTGTTATTATGTTAAGCCTGGTGGCACTAGTAGTGGTGATGCAACTACTGCTTTTGCTAATTCAGT |
| | CTTTAACATATGTCAAGCTGTTTCAGCCAATGTATGTGCCTTAATGTCATGCAATGGCAATAAGATT |
| | GAAGATCTTAGTATACGTGCTCTTCAGAAGCGCTTATACTCACATGTGTATAGAAGTGATAAGGTTG |
| | ATTCAACCTTTGTCACAGAATATTATGAATTTTTAAATAAGCATTTTAGTATGATGATTTTGAGTGA |
| | TGATGGGGTTGTGTGTNNNNNNNNNNNNNNNNNNNNNNNNNNNNNNNNNNNNNNNNNNNNNNNNNNN |
| | NNNNNGGTATTATATTATCAAAATAACGTTTTTATGTCAGAATCCAAATGTTGGGTTGAGCATGACA |
| | TAAATAATGGACCTCATGAATTTTGTTCACAACACACAATGCTTGTAAAGATGGATGGTGACGATGT |
| | CTACCTTCCATATCCTAATCCTAGTCGTATATTAGGAGCTGGATGTTTTGTAGATGATTTGTTAAAG |
| | ACTGATAGTGTTCTTTTAATAGAACGATTTGTAAGTCTTGCAATAGATGCTTATCCACTTGTGTATC |
| | ATGAAAATGAAGAATACCAAAAGGTTTTTCGTGTTTATTTGGCGTATATAAAGAAGTTGTACAATGA |
| | CCTGGGTAATCAGATCTTGGATAGCTACAGTGTTATTTTAAGTACTTGTGATGGACAAAAGTTCACT |
| | GATGAATCCTTTTACAAGAACATGTATTTAAGAAGTGCAGTCATGCAGAGTGTTGGAGCTTGCGTGG |
| | TCTGCTCTTCTCAAACATCATTACGTTGTGGCAGTTGCATCAGAAAGCCTCTTCTTTGCTGCAAGTG |
| | TTGTTATGATCACGTTATGGCGACTGATCATAAATATGTCTTGAGTGTTTCACCATATGTGTGTAAT |
| | GCACCAGGATGTGATGTAAATGATGTTACCAAATTGTATCTAGGTGGTATGTCATATTATTGTGAAG |
| | ACCATAAGCCACAATATTCATTCAAGTTGGTAATGAATGGTTTGGTTTTTGGTCTATATAAACAATC |
| | TTGTACAGGATCTCCGTACATAGACGATTTTAATCGTATAGCTAGTTGTAAATGGACCGATGTGGAT |
| | GATTACATACTAGCTAATGAATGTACAGAGCGCTTGAAATTGTTTGCTGCAGAAACGCAAAAGGCAA |
| | CCGAGGAAGCCTTTAAGCAGAGTTATGCATCAGCAACAATACAAGAGATTGTTAGTGAGCGCGAATT |
| | GATTCTCTCTTGGGAGATTGGAAAAGTTAAGCCACCACTTAATAAAAATTATGTTTTTACTGGCTAC |
| | CATTTTACTAAAAATGGTAAGACAGTTTTAGGTGAGTATGTTTTTGATAAGAGTGAGTTGACTAATG |
| | GTGTGTACTATCGCGCCACAACCACTTATAAGCTATCTGTAGGAGATGTTTTTGTTTTAACCTCTCA |
| | TTCAGTAGCTAATTTAAGTGCTCCTACGCTTGTTCCGCAGGAGAATTATAGTAGTATTAGATTTGCT |
| | AGTGTTTATAGTGTGCTTGAGACGTTTCAGAACAATGTTGTTAATTATCAACACATTGGTATGAAAC |
| | GTTACTGTACCGTGCAAGGACCTCCTGGTACAGGGAAGTCACATCTTGCTATTGGTCTTGCTGTATT |
| | TTATTGTACAGCACGTGTTGTATACACAGCGGCCAGCCATGCAGCTGTTGACGCATTGTGTGAAAAA |
| | GCATATAAATTTTTGAATATAAATGATTGCACTCGTATTGTTCCGGCCAAGGTCAGGGTAGAGTGCT |
| | ATGATAAGTTTAAAATTAATGACACCACTCGTAAGTATGTGTTTACTACCATAAATGCATTACCTGA |
| | GATGGTGACTGATATTGTTGTTGTAGATGAAGTTAGCATGCTTACCAATTATGAGCTTTCTGTTATT |
| | AATGCTCGTATTCGTGCTAAGCATTATGTTTATATTGGTGATCCTGCTCAATTGCCAGCACCACGTG |
| | TGTTATTGAGCAAGGGTACACTTGAACCTAAATATTTTAACACTGTTACTAAGCTCATGTGTTGCTT |
| | AGGGCCAGACATTTTTCTTGGTACATGTTATAGATGTCCTAAGGAAATTGTTGATACAGTGTCCGCC |
| | TTGGTTTATGAAAATAAGCTTAAGGCTAAGAATGAGAGTAGTTCATTGTGTTTTAAGGTCTATTATA |
| | AGGGCGTTACAACACATGAAAGTTCTAGTGCTGTAAATATGCAGCAGATTTATTTGATTAATAAGTT |
| | TTTGAAGGCTAACCCTTTGTGGCATAAAGCTGTTTTTATTAGCCCATATAATAGTCAGAACTTTGCA |
| | GCTAAGCGTGTTTTGGGTTTACAAACCCAAACCGTGGATTCTGCTCAAGGTTCTGAATACGATTATG |
| | TTATATATTCACAGACTGCAGAAACAGCGCATTCTGTAAATGTTAATCGCTTCAATGTTGCCATTAC |
| | TCGAGCCAAGAAAGGTATTCTTTGTGTTATGAGTAATATGCAGTTGTTTGAAGCATTACAGTTTACT |
| | ACATTGACCTTAGATAAAGTGCCACAGGCCGTTGAAACTAAAGTTCAATGTAGTACTAATTTATTTA |
| | AAGATTGTAGCAAGAGTTATAGCGGTTACCACCCAGCTCATGCTCCTTCATTTTTGGCAGTAGATGA |
| | CAAATATAAGGCAACTGGCGATTTAGCCGTGTGTCTTGGCATTAGTGATTCTGCTGTTACATATTCA |
| | AGATTAATATCACTCATGGGTTTTAAATTGGATGTTACCCTTGATGGGTATTGTAAGCTTTTTATAA |
| | CTAAAGAAGAAGCTGTTAAACGCGTGCGTGCCTGGGTTGGCTTTGATGCTGAAGGTGCTCATGCCAC |
| | GCTTGATAGCATTGGGACAAATTTCCCACTCCAATTAGGATTTTCCACAGGAATTGATTTTGTTGTG |
| | GAAGCCACTGGTTTGTTTGCTGATAGAGATGGTTACAGCTTTAAAAAGGCTGTGGCGAAAGCTCCTC |
| | CTGGTGAACAATTTAAGCACCTCATCCCTTTGATGACGAGAGGTCATCGCTGGGATGTTGTTAGACC |
| | TAGAATAGTACAAATGTTTGCAGATCATTTAATTGATCTGTCTGATTGTGTTGTGCTAGTTACATGG |
| | GCAGCCAACTTTGAGCTCACTTGTCTCCGCTACTTTGCAAAAGTAGGTCGTGAGATTTCTTGTAATG |
| | TATGCACTAAACGTGCTACAGTTTACAATTCTAGAACTGGTTACTATGGTTGTTGGCGCCATAGTGT |
| | TACATGTGATTACTTGTATAATCCACTTATTGTTGATATTCAACAGTGGGGATATATTGGTTCTTTA |
| | TCAAGTAATCANGATTTATATTGTAGTGTCCATAAAGGAGCACATGTTGCTTCCTCTGATGCTATAA |
| | TGACACGGTGTTTGGCCGTTTATGATTGCTTTTGCAATAATATTAATTGGAATGTGGAGTATCCCAT |
| | CATTTCAAATGAGTTAAGTATTAATACCTCTTGTAGAGTCTTGCAGCGTGTGATTCTTAAAGCTGCC |
| | ATGCTCTGCAACAGATATACTTTGTGTTATGATATTGGCAACCCAAAAGGGATTGCCTGTGTCAAAG |
| | ATTTTGATTTTAAGTTCTATGATGCCCAACCAATTGTTAAGTCTGTTAAGACTCTTTTGTATTCTTT |
| | TGAGGCACATAAGGACTCTTTTAAAGACGGTTTGTGTATGTTTTGGAACTGTAATGTGGATAAGTAT |
| | CCACCGAATGCAGTTGTATGTAGATTTGACACTAGAGTGTTGAATAATTTAAATCTTCCTGGCTGTA |
| | ATGGAGGTAGTTTGTATGTTAATAAACATGCATTCCACACTAAACCCTTTGCTAGGGCAGCCTTTGA |
| | GCATTTGAAGCCTATGCCATTCTTCTATTATTCAGATACGCCTTGTGTGTATATGGATGGTATGGAT |
| | GCTAAGCAGGTTGATTATGTACCTTTGAAATCTGCCACGTGCATCACAAGATGCAATTTAGGTGGTG |
| | CAGTTTGTTTAAAACATGCTGAAGAGTATCGTGAGTACTTAGAGTCTTACAATACAGCTACTACAGC |
| | AGGTTTTACTTTTTGGGTCTATAAGACATTTGATTTTTATAATTTGTGGAATACGTTCACCAAGCTA |
| | CAAAGCTTGGAGAATGTTGTATATAATTTAGTCAAGACTGGTCATTATACAGGACAGGCTGGTGAAA |
| | TGCCTTGTGCCATTATAAATGATAAAGTTGTGACTAAGATCGATAAGGAGGATGTTGTCATTTTTAT |
| | TAATAATACAACATACCCTACTAATGTGGCTGTTGAATTATTTGCCAAGCGCAGTGTTCGACACCAC |
| | CCAGAGCTTAAGCTCTTTAGAAATTTAAATATAGACGTGTGTTGGAAGCACGTCATTTGGGATTATG |
| | CTAGAGAAAGTATATTTTGCAGTAATACCTATGGTGTCTGCATGTATACAGATTTAAAGTTCATTGA |
| | TAAATTGAATGTCCTTTTTGATGGTCGTGATAATGGTGCTTTTGAAGCTTTTAAACGCTCTAATAAT |
| | GGCGTTTACATTTCCACGACAAAAGTTAAGAGTCTTTCGATGATAAGAGGTCCACCGCGTGCTGAAT |
| | TAAATGGCGTGGTGGTGGACAAGGTTGGAGACACTGATTGTGTGTTTTATTTTGCTGTGCGTAAAGA |
| | AGGTCAGGATGTCATCTTCAGCCAATTCGACAGCCTGGGAGTCAGCTCTAACCAGAGCCCACAAGGT |
| | AATCTGGGGAGTAATGGTAAACCCGGTAATGTCGGTGGTAATGATGCTCTGTCAACCTCAACTATCT |
| | TTACACAAAGCCGTGTTATTAGCTCTTTTACATGTCGTACTGATATGGAAAAAGATTTTATAGCTTT |
| | AGATCAAGATGTGTTTATTCAGAAGTATGGTTTGGAGGACTATGCCTTTGAACACATTGTTTATGGT |
| | AATTTCAACCAGAAGATTATTGGTGGTTTGCACTTGTTAATAGGCTTGTACCGAAGACAGCAAACTT |
| | CCAATCTGGTTGTTCAGGAGTTTGTCTCATATGACTCCAGCATACACTCTTATTTTATCACTGACGA |
| | GAAGAGTGGTGGTAGTAAGAGTGTTTGCACTGTTATAGACATTTTATTGGATGATTTTGTGACTCTT |
| | GTTAAGTCACTTAATCTTAATTGTGTGAGTAAAGTTGTTAATGTTAATGTTGATTTTAAAGATTTTC |
| | AGTTTATGCTTTGGTGTAACGATGAGAAAGTTATGACTTTCTATCCTCGTTTGCAAGCTGCATCTGA |
| | CTGGAAGCCTGGTTATTCTATGCCTGTATTATATAAGTATTTGAATTCTCCAATGGAAAGAGTTAGT |
| | CTCTGGAATTATGGGAAGCCAGTTACTTTGCCTACAGGCTGTATGATGAATGTTGCTAAGTATACTC |
| | AGTTATGTCAATATCTGAATACTACAACATTAGCTGTACCTGTTAATATGCGAGTTTTGCATTTAGG |
| | TGCAGGTTCAGAAAAAGGAGTAGCACCGGGTTCTGCAGTTCTTAGGCAGTGGTTGCCTGCTGGTACT |
| | ATTCTTGTAGATAATGATTTATACCCATTTGTTAGTGACAGTGTCGCTACATATTTTGGGGATTGTA |
| | TAACTTTACCCTTTGATTGTCAATGGGATTTGATAATTTCTGATATGTATGACCCTATTACTAAGAA |
| | CATAGGTGAGTACAATGTGAGTAAAGATGGTTTCTTTACATACATTTGTCATATGATTCGAGACAAG |
| | TTAGCTCTTGGTGGCAGTGTTGCTATAAAAATAACAGAGTTTTCTTGGAATGCAGAATTATATAATT |
| | TAATGGGGTATTTTGCATTTTGGACTGTGTTTTGCACAAATGCAAATGCTTCTTCTAGTGAAGGATT |
| | TTTAATTGGCATAAATTATTTGTGTAAGCCCAAGGTTGAGATAGATGGAAATGTTATGCATGCCAAT |
| | TATTTGTTTTGGAGAAATTCCACAGTTTGGAACGGGGGTGCTTATAGCCTGTTTGACATGGCTAAAT |
| | TCCCGCTTAAGTTGGCTGGTACTGCCGTAATAAATTTAAGAGCAGACCAGATTAATGATATGGTTTA |
| | TTCCCTTCTTGAAAAGGGTAAACTACTTATTAGAGATACAAATAAAGAAGTTTTCGTTGGTGACAGT |
| | TTGGTTAATGTAATCTAAACTTTAAAAATGGCTGTCGCTTATGCAGACAAGCCTAATCATTTTATCA |
| | ATTTTCCACTTACCCATTTTCAGGGTTTTGTGTTAAATTATAAAGGTTTACAATTTCAAATTCTCGA |
| | TGAAGGAGTGGATTGTAAAATACAAACAGCGCCACACATTAGTCTTACTATGCTGGATATACAGCCT |
| | GAAGACTATAAAAGTGTTGATGTCGCTATTCAAGAAGTTATTGATGATATGCATTGGGGTGATGGTT |
| | TTCAGATTAAATTTGAGAATCCTCACATCCTAGGAACATGCATAGTTTTAGATGTTAAAGGTGTAGA |
| | AGAATTGCATGACGATTTAGTTAATTACATTCGTGATAAAGGTTGTGTTGCTGACCAATCCAGGAAA |
| | TGGATTGGCCATTGTACCATAGCTCAACTCACGGATGCAGCACTGTCCATTAAGGAAAATGTTGATT |
| | TTATAAACAGCATGCAATTCAATTATAAAATCACCATCAACCCCTCATCACCAGCTAGACTTGAAAT |
| | AGTTAAGCTCGGTGCTGAAAAGAAAGATGGTTTTTATGAAACCATAGTTAGTCACTGGATGGGAATT |
| | CGTTTTGAATACACATCGCCCACTGATAAGCTAGCTATGATTATGGGTTATTGTTGTTTAGATGTGG |
| | TACGTAAAGAGCTAGAAGAAGGCGATCTTCCCGAGAATGATGATGATGCTTGGTTTAAGCTATCGTA |
| | CCATTATGAAAACAATTCTTGGTTCTTCCGACATGTCTACAGGAAAAGTTTTCATTTCCGTAAGGCT |
| | TGTCAAAATTTAGATTGTAATTGTTTGGGGTTTTATGAATCTTCAGTTGAAGAATATTAAACTCAGT |
| | GAAAATGTTTTTGCTTTCTAGATTTATTCTAGTTAGCTGCGTAATTGGTAGCTTAGGTTTTTATAAC |
| | CCTCCTACCAATGTTGTTTCGCATGTAAATGGAGATTGGTTTTTATTTGGTGACAGTCGTTCAGATT |
| | GTAATCATATTGTTAATATCAACCCCCATAATTATTCTTATATGGACCTTAATCCTGCTTTATGTGA |
| | TTCTGGTAAAATATCATCTAAAGCTGGCAACTCCATTTTCAGGAGTTTTCACTTTACCGATTTTTAT |
| | AATTATACAGGCGAAGGTCAACAAATTATTTTTTATGAGGGTGTTAATTTTACGCCTTATCATGCCT |
| | TTAAATGCAACCGTTCTGGTAGTAATGATATTTGGATGCAGAATAAAGGCTTGTTTTATACTCAGGT |
| | TTATAAGAATATGGCTGTGTATCGCAGCCTTACTTTTGTTAATGTATCATATGTTTATAATGGCTCC |
| | GCACAAGCTACATCTTTTTGTAAATCTGGTAGTAAGCTTAAGAATTTAGTCCTTAATAACCCTGCTT |
| | ATATAGCTCCTCAAGCTAAATCTGGGATTATTACGAAGGTTGAAGCTGATTTTTATTTGTCAGGTTG |
| | TGACGAGTATATCGTACCACTTTGTATTTTTAACGGCAAGTCTTTGTCGAATACAAAGTATTATGAT |
| | CATAGTCAATATTATTTTAATAAAGACACTGGTGTTATTTATGGTCTCAATTCAACAGAAACCATTA |
| | CCACTGGTTTTGATCTTAATTGTCATTATTTAGTTTTACCCTCTGGTAATTATTTAGCCATTTCAAA |
| | TGAGCTATTGTTAACTGTTCCTACGAAAGCAATCTGTTTTAATAAGCGTAAGGATTTTACGCCTGTA |
| | CAGGTTGTTGATTCGCGGTGGAACAATGCCAGGCAGTCTGATAACATGACGGCGGTTGCTTGTCAAC |
| | CTCCGTACTGTTATTTTCGTAATTCTACTACCAACTATGTTGGTGTTTATGATATTAATCATGGAGA |
| | TGCTGGTTTCACTAGCATACTCAGTGGTTTGTTATATAATTCATCTTGTTTTTCGCAGCAAGGTGTT |
| | TTTAGGTATGATAATATTAGCAGTGTTTGGCCTCTCTACCCCTATGGCAGATGTCCTACTGCTGCTT |
| | ATATTAATATCCCTGATTTACCCATTTGTGTGTATGATCCGCTACCAGTTATTTTGCTTGGCATTCT |
| | TTTGGGCGTTGCCATTGTAATTATTGTAGTTTTTTTGTTACATTTTATGGTGGATAATGTTACTAGG |
| | CTGCATGATGCTTAGACCATAATCTAAACATGTTTTTGATACTTTTAATTTCCTTACCAACGGCTTT |
| | TGCTGTTATAGGAGATTTAAATTGTACTTTAGATCCTAGGCTTAAAGGTAGCTTTAATAATAGAGAC |
| | ACCGGTCCTCCTTCTATAAGTATTGATACTGTTGATGTTACTAATGGTTTGGGTACTTATTATGTTT |
| | TAGATCGTGTGTATTTAAATACCACGTTGTTTCTTAATGGTTATTACCCCACTTCAGGTTCCACATA |
| | TCGTAATATGGCACTGAAGGGAACTGACTTATTGAGCACATTATGGTTTAAACCACCATTTCTTTCT |
| | GATTTTATTAATGGTATTTTTGCTAAGGTCAAAAATACCAAGGTTTTTAAAGATGGTGTAATGTATA |
| | GTGAGTTCCCTGCTATAACTATAGGTAGTACTTTTGTAAATACATCCTATAGTGTGGTAGTACAACC |
| | ACGTACAATTAATTCAACACAGGATGGTGTTAATAAATTACAAGGTCTTTTAGAGGTCTCTGTTTGC |
| | CAGTATAATATGTGTGAGTACCCACATACGATTTGTCATCCTAACTTGGGTAACCATTTCAAAGAAC |
| | TATGGCATTATGATACAGGTGTTGTTTCCTGTTTGTATAAGCGTAATTTCACATATGATGTGAATGC |
| | TACTTATTTGTATTTTCATTTTTATCAAGAAGGTGGTACTTTTTATGCATATTTTACAGACACTGGT |
| | TTTGTTACTAAGTTTTTGTTTAATGTTTATTTAGGCATGGCACTTTCACACTATTATGTCATGCCTC |
| | TGACTTGTATTCGTAGGTCTAAAGACGGTTTTAGTCCAGAATATTGGGTTACACCCCTCACTCCTAG |
| | ACAATATTTACTCGCTTTCAATCAAGATGGTATTATTTTTAATGCTGTTGATTGTATGAGTGATTTT |
| | ATGAGTGAGATTAAGTGTAAAACACAATCTATAGCACCACCCACTGGTGTTTATGAATTAAACGGTT |
| | ACACTGTTCAGCCAATTGCAGATGTTTACCGACGCAAACCTGATCTTCCCAATTGTAATATAGAAGC |
| | TTGGCTTAATGATAAGTCGGTGCCCTCCCCATTAAATTGGGAACGTAAGACATTTTCAAATTGTAAT |
| | TTTAATATGAGCAGCCTGATGTCTTTTATTCAGGCAGATTCATTTACTTGTAATAATATTGATGCTG |
| | CTAAGATATATGGTATGTGTTTTTCCAGCATAACTATAGATAAGTTTGCTATACCCAATCGCAGGAA |
| | GGTTGACCTACAATTGGGTAATTTGGGCTATTTGCAGTCATCCAACTATAGAATTGATACTACTGCA |
| | ACAAGTTGTCAGTTGTATTATAATTTACCTGCTGCTAATGTCTCTGTTAGCAGGTTTAATCCTTCTA |
| | CTTGGAATAAGAGATTTGGTTTTATAGAAGATTCTGTTTTTAAACCTCAACCTGCAGGTGTTCTTAC |
| | CAATCATGATGTAGTTTATGCCCAACATTGTTTTAAAGCTCCTAAAAATTTCTGTCCGTGTAGTTCC |
| | TGTTCTGGTAAAAATAATGGTATAGGCACTTGTCCTGCAGGTACTAATTCTTTAACTTGTGATAATT |
| | TATGTACTCTTGATCCTATTACACTTAAAGCTCCAGATACTTATAAGTGTCCCCAATCTAAATCTTT |
| | AGTTGGTATAGGTGAGCACTGTTCGGGTCTTGCTGTTAAAAGTGATTATTGTGGAAACAATTCTTGT |
| | ACTTGCCAACCACAAGCATTTTTGGGTTGGTCTGCAGACTCTTGTTTACAAGGAGACAAGTGTAATA |
| | TTTTTGCTAATTTCATTTTGCATGATGTTAATAATGGTCTTACTTGTTCCACTGATTTACAAAAAGC |
| | TAACACAGAAATAGAACTTGGTGTTTGTGTTAATTATNACCTCTATGGTATTTCAGGCCAAGGCATT |
| | TTTGTTGAGGTTAATGCGACTTATTATAATAGTTGGCAGAACCTTTTATATGATTCTAATGGTAACC |
| | TCTACGGTTTTAGAGACTACATAACAAACAGAACTTTTATGATTCATAGTTGCTATAGCGGTCGTGT |
| | TTCTGCGGCCTATCATGCCAATTCTTCCGAACCAGCATTGCTATTTCGGAATATTAAATGCAACTAC |
| | GTTTTTAATAATAGTCTTACACGACAGCTGCAACCCATTAACTATTCGTTTGATAGTTATCTTGGTT |
| | GTGTTGTCAATGCTTATAATAGTACTGCTATTTCTGTCCAAACATGTGATCTCACAGTAGGTAGTGG |
| | TTACTGTGTGGATTACTTTAAAAACAGACGAAGTCGTAGAGCGATCACCACTGGTTATCGGTTTACT |
| | AATTTTGAGCCATTTACTGTTAATTCAGTAAATGATAGTTTGGAACCTGTAGGTGGTTTGTATGAAA |
| | TTCAAATACCTTCAGAGTTTACTATAGGTAATATGGAGGAGTTTATTCAAACAAGCTCTCCCAAAGT |
| | TACTATTGATTGTGCTGCATTTGTCTGTGGTGATTATGCAGCATGTAAATTACAGTTGGTTGAATAT |
| | GGTAGTTTCTGTGATAACATTAATGCCATACTCACAGAAGTAAATGAACTACTTGATACTACACAGT |
| | TGCAAGTAGCTAATAGTTTAATGAATGGTGTTACTCTTAGCACTAAGCTTAAAGATGGTGTTAATTT |
| | CAATGTAGACGACATCAATTTTGCCCCTGTATTAGGTTGTCTAGGCAGCGAATGTAGTAAAGCTTCC |
| | AGTAGATCTGCTATAGAGGATTTACTTTTTGATAAAGTAAAGTTATCTGATGTCGGTTTCGTTGAGG |
| | CTTATAATAATTGTACAGGAGGTGCCGAAATTAGGGACCTCATTTGTGTGCAAAGTTATAAAGGCAT |
| | CAAAGTGTTACCTCCACTGCTCTCAGAAAATCAGATCAGTGGATATACTTTGGCTGCCACCTCTGCT |
| | AGTCTATTTCCTCCTTGGACAGCAGCAGCAGGTGTACCATTTTATTTAAATGTTCAGTATCGCATTA |
| | ATGGGCTTGGTGTCACCATGGATGTGCTAAGTCAAAATCAAAAGCTTATTGCTAATGCATTTAACAA |
| | TGCCCTTCATGCTATTCAGCAAGGGTTCGATGCAACTAATTCTGCTTTAGTTAAAATTCAAGCTGTT |
| | GTTAATGCAAATTCTGAAGCTCTTAATAACTTATTGCAACAACTCTCTAATAGATTTGGTGCTATAA |
| | GTGCTTCTTTACAAGAAATTCTATCTAGACTTGATGCTCTTGAAGCGGAAGCTCAGATAGATAGACT |
| | TATTAATGGTCGTCTCACCGCTCTTAATGCTTATGTTTCTCAACAGCTTAGTGATTCTACACTGGTA |
| | AAATTTAGTGCAGCACAAGCTATGGAGAAGGTTAATGAATGTGTCAAAAGCCAATCATCTAGGATAA |
| | ATTTCTGTGGTAATGGTAATCATATTATATCATTAGTGCAGAATGCTCCATATGGTTTGTATTTTAT |
| | CCACTTTAATTATGTCCCTACTAAGTATGTCACAGCGAAGGTTAGTCCTGGTCTGTGCATTGCTGGT |
| | AATAGAGGTATAGCTCCTAAGAGTGGTTATTTTGTTAATGTAAATAATACTTGGATGTACACTGGTA |
| | GTGGTTATTACTACCCTGAACCTATAACTGAAAATAATGTTGTTGTTATGAGTACCTGCGCTGTTAA |
| | TTATACTAAAGCGCCGTATGTAATGCTGAACACTTCAATACCCAACCTTCCTGATTTTAAGGAAGAG |
| | TTGGACCAATGGTTCAAAAATCAAACATCAGTGGCACCAGATTTGTCACTTGATTATATAAATGTTA |
| | CATTCTTGGACCTACAAGTTGAAATGAATAGGTTACAGGAGGCAATAAAAGTTTTAAATCATAGCTA |
| | CATCAATCTCAAGGACATTGGTACATATGAATATTATGTAAAATGGCCTTGGTATGTATGGCTTTTA |
| | ATCTGCCTTGCTGGTGTAGCTATGCTTGTTTTACTATTCTTCATATGCTGTTGTACAGGATGTGGGA |
| | CTAGTTGTTTTAAGAAATGTGGTGGTTGTTGTGATGATTATACTGGATACCAGGAGTTAGTAATCAA |
| | AACTTCACATGACGACTAAGTTCGTCTTTGATTTATTGCATTGATCTTTTGTTAGATCTTTTTCCAA |
| | TCTAGCATTCTTTACCACGCCCTTTTAATGGACATTTGGAGACCTGAGAAGAAATTTCTCCGTTACA |
| | TTAACGGTTTTAATGTCTCAGAATTAGAAGATGCTTGTTTTAAATTTAACTATCAATTTCCTAAAGT |
| | AGGATATTGTAGAGTTCCTAGTCATGCTTGGTGCCGTAATCAAGGTAGATTTTGTGCTACATTCACT |
| | CTTTATGGTAAATCCAAACATTATGATAAATATTTTGGAGTAATAAATGGTTTCACAGCATTCGCTA |
| | ATACTGTAGAGGATGCTGTTAACAAACTGGTTTTCTTAGCTGTTGACTTTATTACCTGGCGTAGACA |
| | GGAGTTAAATGTTTATGGCTGATGCTTATCTTGCAGACACTGTGTGGTATGTGGGGCAAATAATTTT |
| | TATAGTTGCCATTTGTTTATTGGTTACAATAGTTGTAGTGGCATTTTTGGCAACTTTTAAATTGTGT |
| | ATTCAACTTTGCGGTATGTGTAATACCTTAGTACTGTCCCCTTCTATTTATGTGTTTAATAGAGGTA |
| | GGCAGTTTTATGAGTTTTACAATGATATAAAACCACCAGTCCTTGATGTGGATGACGTTTAGGTAAT |
| | CCAAACATTATGAGTAGTAAACCTACACCAGCACCAGTTTATATCTGGACTGCTGATGAAGCTATTA |
| | AATTCCTAAAGGAATGGAATTTTTCTTTGGGTATTATACTACTTTTTATTACAATCATATTGCAATA |
| | TGGATATACAAGTCGCAGTATGTTTGTTTATGTTATTAAGATGATTATTTTGTGGCTTATGTGGCCC |
| | ATTACTATAATCTTAACTACTTTCAATTGCGTATACGCATTGAATAACGTGTATCTTGGCCTTTCTA |
| | TAGTTTTTACCATAGTGGCCATTATTATGTGGATTGTGTATTTTGTGAATAGTATCAGGTTGTTTAT |
| | TAGAACTGGAAGTTTTTGGAGTTTTAACCCAGAAACAAACAACTTGATGTGTATAGATATGAAAGGA |
| | ACAATGTATGTTAGGCCGATAATTGAGGACTATCATACCCTGACGGTCACAATAATACGCGGTCATC |
| | TTTATATTCAAGGTATAAAACTAGGTATTGGCTATTCTTTGGCAGATTTGCCAGCTTATATGTCTGT |
| | TGCTAAGGTTACACACCTGTGCACATATAAGCGTGGTTTTCTTGACAGGATAAGCGATACTAGTGGT |
| | TTTGCTGTTTATGTTAAGTTCAAAGTCGGTAATTACCGACTGCCATCAACCCAAAAGGGTTCTGGCA |
| | TGGACACCGCATTGTTGAGAAATAATATCTAAATTTTAAGGATGTCTTTTACTCCTGGTAAGCAATC |
| | CAGTAGTAGAGCGTCCTCTGGAAATCGGTCTGGTAATGGCATCCTCAAGTGGGCCGATCAGTCCGAC |
| | CAGTTTAGAAATTTTCAAACCAGGGGTAGAAGAGCTCAACCCAAGCAAACTGCTACTTCTCAGCAAC |
| | CATCAGGAGGGAATGTTGTACCCCACTATTCTTGGTTCTCTGGAATTACTCAGTTTCAAAAGGGAAA |
| | GGAGTTTGAGTTTGCAGAAGGACAAGGTGTGCCTATTGCACCAGGAGTCCCAGCTACTGAAGCTAAG |
| | GGGTACTGGTACAGACACAACAGACGTTCTTTTAAAACAGCCGATGGCAACCAGCGTCAACTGCTGC |
| | CACGATGGTATTTTTACTATCTGGGAACCGGACCGCATGCTAAAGACCAGTATGGCACCGATATTAA |
| | CGGAGTCTACTGGGTCGCTAGCAACCAGGCTGATGTCAATACCCCGGCTGACATTGTCGATCGGGAC |
| | CCAAGTAGCGATGAGGCTATTCCGACTAGGTTTCCGCCTGGCACGGTACTCCCTCAGGGTTACTATA |
| | TTGAAGGCTCAGGAAGGTCTGCTCCTAATTCCAGATCTACTTCGCGCACATCCAGCAGAGCCTCTAG |
| | TGCAGGATCGCGTAGTAGAGCCAATTCTGGCAATAGAACCCCTACCTCTGGTGTAACACCTGACATG |
| | GCTGATCAAATTGCTAGTCTTGTTCTGGCAAAACTTGGCAAGGATGCCACCAAACCTCAGCAAGTAA |
| | CTAAGCATACTGCCAAAGAAGTCAGACAGAAAATTTTGAATAAACCCCGCCAGAAGAGGAGCCCCAA |
| | TAAACAATGCACTGTTCAGCAGTGTTTTGGTAAGAGAGGCCCTAATCAGAATTTTGGTGGTGGAGAA |
| | ATGTTAAAACTTGGAACTAGTGACCCACAGTTCCCCATTCTTGCAGAACTCGCACCCACAGCTGGTG |
| | CGTTTTTCTTTGGATCAAAATTAGAGTTGGCCAAAGTGCAGAATTTATCTGGGAATCCTGATGAGCC |
| | TCAGAAGGATGTTTATGAATTGCGCTATAACGGCGCAATTAGGTTTGACAGTACACTTTCAGGCTTT |
| | GAGACCATAATGAAGGTGCTGAGTGAGAATTTGAATGCCTATCAACAACAAGATGGTATGATGAATA |
| | TGAGTCCAAAACCACAGCGTCAGCGTGGTCATAAGAATGGACAAGGAGAAAATGATAATATAAGTGT |
| | TGCAGTGCCCAAAAGCCGCGTGCAGCAAAATAAGAGTATAGAGTTGACTGCAGAGGACATCAGCCTT |
| | CTTAAGAAGATGGATGAGCCCTTTACTGAAGACACCTCAGAAATATAAGAGAATGAACCTTATGTCG |
| | GCATCTGGTGGTAACCCCTCGCAGAAAAGTCGAGATAAGGCACTCTCTATCAGAATGGATGTCTTGC |
| | TGCTATAATAGATAGAGAAGGTTATAGCAGACTATATATTAATTAGTTGAAAGTTTTGTGTTGTAAT |
| | GTATAGTGTTGGAGAAAGTGAAAGACTTGCGGAAGTAATTGCCGACAAGTGCCAAAGGGAAGAGCCA |
| | GCATGTTAAGTTACTACCCAGTAATTAGTAAATGAATGAAGTTAATTATGGCCAATTGGAAG |
| 8 | GenBank Accession No. MN306018.1 (Human coronavirus NL63 strain |
| | HCoV_NL63/Seattle/USA/SC0179/2018, complete genome) |
| | ACTTTGTGTCTACTCTTCTCAACTAAACGAAATTTTTCTAGTGCTGTCATTTGTTATGGCAGTCCTA |
| | GTGTAATTGAAATTTCGTTTAGTTTGTAAACTGGTTAGGCAAGTGTTGTATTTTCTGTGTCTAAGCA |
| | CTGGTGATTCTGTTCACTAGTGCATACACTGATATTTAAGTGGTGTTCCGTCACTGCTTATTGTGGA |
| | AGCAACGTTCTGTCGTTGTGGAAACCAATAACTGCTAACCATGTTTTACAATCAAGTGACACTTGCT |
| | GTTGCAAGTGATTCGGAAATTTCAGGTTTTGGTTTTGCCATTCCTTCTGTAGCCGTTCGCACTTATA |
| | GCGAAGCCGCTGCACAAGGTTTTCAGGCATGCCGTTTTGTTGCTTTTGGCTTACAGGATTGTGTAAC |
| | CGGTATTAATGATGATGATTATGTCATTGCATTGACTGGTACTAATCAACTCTGTGCCAAAATTTTA |
| | CCTTTTTCTGATAGACCCCTTAATTTGCGAGGTTGGCTCATTTTTTCTAACAGCAATTATGTTCTTC |
| | AGGACTTTGATGTTGTTTTTGGCCATGGTGCAGGAAGTGTGGTTTTTGTGGATAAGTATATGTGTGG |
| | TTTTGATGGTAAACCTGTGTTACCTAAAAACATGTGGGAATTTAGGGATTACTTTGATAATAATACT |
| | GATAGTATTGTTATTGATGGTGTCACTTATCAACTAGCATGGGATGTTATACGTAAAGACCTTTCTT |
| | ATGAACAGCAAAATGTTTTAGCCATTGAGAGCATTCATTACCTTGGTACTACAGGTCATACTTTGAA |
| | GTCCGGTTGCAAACTTATTAATGCCAAGCCGCCTAAATATTCTTCTAAGGTTGTTTTGAGTGGTGAA |
| | TGGAATGCTGTGTATAGGGCATTTGGTTCACCATTTATTACAAATGGTATGTCATTGCTAGATATAA |
| | TTGTTAAACCAGTTTTCTTTAATGCTTTTGTTAAATGCAATTGTGGTTCTGAGAGTTGGAGTGTTGG |
| | TGCATGGGATGGTTACTTATCTTCTTGTTGTGGCACACCTGCTAAGAAACTTTGTGTTGTTCCTGGT |
| | AATGTTGTTCCTGGTGATGTGATCATCACCTCAACTGGTGCTGGTTGTGGTGTTAAATACTATGCTG |
| | GCTTAGTTGTTAAACATATTACTAACATTACTGGTGTGTCTTTATGGCGTGTTACAGCTGTTCATTC |
| | TGATGGAATGTTTGTGGCATCATCTTCTTATGATGCACTCTTGCATAGAAATTCATTAGACCCTTTT |
| | TGCTTTGATGTTAACACTTTACTTTCTAATCAATTACGTCTAGCTTTTCTTGGTGCTTCTGTTACAG |
| | AAGATGTTAAATTTGCTGCTAGCACTGGTGTTATTGACATTAGTGCTGGTATGTTTGGTCTTTATGA |
| | TGACATATTGACAAACAACAAACCTTGGTTTGTACGCAAAGCTTCTGGGCTTTTTGATGCAATCTGG |
| | GATGCTTTTGTTGCCGCTATTAAGCTTGTACCAACTACTACTGGTGTTTTGGTTAGGTTTGTTAAGT |
| | CTATTGCTTCAACTGTTTTAACTGTCTCTAATGGTGTTATTATTATGTGTGCAGATGTTCCAGATGC |
| | TTTTCAATCAGTTTATCGCACATTTACACAAGCTATTTGTGCTGCATTTGATTTTTCTTTAGATGTA |
| | TTTAAAATTGGTGATGTTAAATTTAAACGACTTGGTGATTATGTTCTTACTGAAAACGCTCTTGTTC |
| | GTTTGACTACTGAAGTTGTTCGTGGTGTTCGTGATGCTCGCATAAAGAAAGCCATGTTTACTAAAGT |
| | AGTTGTAGGTCCTACAACTGAAGTTAAGTTTTCTGTTATTGAACTTGCCACTGTTAATTTGCGTCTT |
| | GTTGATTGTGCACCTGTAGTTTGCCCTAAAGGTAAGATTGTTGTTATTGCTGGACAAGCTTTTTTCT |
| | ATAGTGGTGGTTTTTATCGTTTTATGGTTGATCCTACAACTGTATTAAATGATCCTGTTTTTACTGG |
| | TGATTTATTTTACACTATTAAGTTTAGTGGTTTTAAGCTTGATGGTTTTAACCATCAGTTTGTTACT |
| | GCTAGTTCTGCTACTGATGCTATTATTGCTGTTGAGCTGTTGTTATTGGATTTTAAAACTGCAGTTT |
| | TTGTGTACACATGTGTGGTTGATGGCTGTAGTGTCATTGTTAGACGTGATGCTACATTCGCTACACA |
| | TGTGTGTTTTAAGGACTGTTATAATATTTGGGAGCAATTCTGCATTGATAATTGTGGTGAGCCATGG |
| | TTTTTGACTGATTATAATGCTATCTTGCAGAGTAATAACCCTCAATGTGCTATTGTTCAAGCATTGG |
| | AGTCTAAAGTTTTGCTTGAGAGGTTTTTACCTAAGTGTCCTGAAATACTGTTGAGTATTGATGATGG |
| | CCATTTATGGAATCTTTTTGTTGAAAAGTTTAATTTTGTTACAGATTGGTTAAAAACTCTTAAGCTT |
| | ACACTTACTTCTAATGGTCTTTTAGGTAATTGTGCCAAACGTTTTAGACGTGTTTTGGTAAAATTGC |
| | TTGATGTCTATAATGGTTTTCTTGAAACTGTCTGTAGTGTCGCATACACTGCTGGTGTTTGCATCAA |
| | ATATTATGCTGTTAATGTTCCATATGTAGTTATTAGTGGTTTTGTAAGTCGTGTAATTCGTAGAGAA |
| | AGGTGTGACATGACTTTTCCTTGTGTTAGTTGTGTCACCTTTTTCTATGAATTTTTAGACACTTGTT |
| | TTGGTGTTAGTAAACCTAATGCCATTGATGTTGAACATTTAGAGCTTAAAGAAACCGTTTTTGTTGA |
| | ACCTAAGGATGGTGGTCAATTTTTTGTTTCTGGTGATTATCTTTGGTATGTTGTAGATGACATTTAT |
| | TATCCAGCTTCATGTAATGGTGTATTGCCAGTTGCTTTTACAAAATTAGCAGGTGGTAAAATATCTT |
| | TTTCTGATGATGTTATAGTTCATGATGTTGAACCTACCCATAAAGTCAAGCTCATATTTGAGTTTGA |
| | AGATGATGTTGTTACCAGTCTTTGTAAGAAGAGTTTTGGTAAGTCCATTATTTATACAGGTGATTGG |
| | GAAGGTCTACATGAAGTTCTTACATCTGCAATGAATGTCATTGGGCAACATATTGAGTTGCCACAAT |
| | TTTATATTTATGATGAAGAGGGTGGTTATGATGTTTCTAAACCAGTTATGATTTCACAATGGCCTAT |
| | TAGTAATGATAGTAATGGTTGTGTTGTTGAAGCGAGCACTGATTTTCATCAATTAGAATGTATTGTT |
| | GATGATTCTGTTAGAGAAGAGGTTGATATAATTGAACAACCTTTTGAAGAAGTTGAACATGTGCTCT |
| | CAATTAGACAACCTTTTTCTTTTTCTTTTAGAGATGAATTGGGTGTTCGTGTTTTAGATCAATCTGA |
| | TAATAATTGTTGGATTAGTACCACACTTGTACAGTTGCAACTTACAAAGCTTTTGGATGATTCTATT |
| | GAGATGCAATTGTTTAAAGTTGGTAAAGTTGATTCAATTGTCCAAAAGTGTTATGAGTTGTCTCATT |
| | TAATTAGTGGTTCACTTGGTGATAGTGGTAAACTTCTTAGTGAACTTCTTAAAGAAAAATATACATG |
| | TTCTATAACTTTTGAGATGTCTTGTGATTGTGGTAAAAAGTTTGATGAGCAGGTTGGTTGTTTGTTT |
| | TGGATTATGCCTTACACAAAACTTTTTCAAAAAGGTGAGTGTTATATTTGTCATAAAATGCAGACTT |
| | ATAAGCTTGTTAGTATGAAAGGTACTGGTGTGTTTGTACAGGACCCAGCACCTATTGACATTGATGC |
| | TTTCCCTGTGAAACCTATATGTTCATCTGTATATTTAGGTGTTAAGGGTTCTGGTCATTATCAAACA |
| | AATTTATACAGTTTTAATAAAGCTATTGATGGTTTTGGTGTCTTTGACATTAAAAATAGTAGTGTTA |
| | ATACTGTTTGTTTTGTCGATGTTGATTTTCATAGTGTAGAAGTAGAAGCTGGTGAAGTTAAACCTTT |
| | TGCTGTATATAAAAATGTTAAATTTTATTTAGGTGACATTTCACACCTTATAAACTGTGTTTCTTTT |
| | GACTTTGTTGTCAATGCTGCTAATGAGAATCTTATGCATGGAGGCGGTGTTGCACGTGCTATTGATA |
| | TTTTGACTGAAGGTCAACTTCAGTCATTATCTAAAGATTACATTAGTAGTAATGGTCCACTTAAGGT |
| | AGGAACAGGTGTTATGTTGGAGTGTGAAAAATTCAATGTATTTAATGTTGTTGGTCCGCGAGCTGGT |
| | AAACATGAGCATTCATTACTTGTTGAAGCTTATAATTCTATCTTAGTTGAAAATGGTATTCCACTTA |
| | TGCCTCTTCTTAGTTGTGGTATTTTTGGTGTAAGGATTGAAAATTCTCTTAAAGCTTTGTTTAGTTG |
| | TGACNTTAATAAATTATTGCAAGTTTTTGTTTATTCTTCAAATGAAGAACAAGCTGTTCTTAAGTTT |
| | TTAGATGGTTTAGATTTAACACCAGTCATTGATGATGTTGATGTTGTTAAACCTTTTAGAGTTGAAG |
| | GTAATTTTTCATTCTTTGATTGTGGTGTCAATGCCTTGGATGGTGATATTTACTTATTATTCACTAA |
| | CTCTATTTTAATGTTGGATAAACAAGGACAATTATTGGATACAAAACTTAATGGTATTTTGCAACAG |
| | GCAGCTCTTGATTATCTTGCTACAGTTAAAACTGTACCAGCTGGTAATTTGGTTAAACTTGTTGTTG |
| | AGAGTTGTACCATTTATATGTGTGTTGTACCATCGATAAATGATCTTTCTTTTGATAAAAATCTTGG |
| | TCGTTGTGTGCGTAAACTTAATAGATTGAAAACTTGTGTTATTGCCAATGTTCCTGCTATTGATGTT |
| | TTGAAAAAGCTTCTTTCAAGTTTGACTTTAACTGTTAAATTTGTTGTAGAGAGTAATGTTATGGATG |
| | TTAACGACTGTTTTAAGAATGATAATGTAGTTTTGAAAATTACTGAAGATGGTATTAATGTTAAAGA |
| | TGTTGTTGTTGAGTCTTCTAAGTCACTTGGTAAACAATTGGGTGTTGTGAGTGATGGTGTTGACTCT |
| | TTTGAAGGTGTTTTGCCTATTAATACTGATACTGTCCTATCTGTAGCTCCAGAAGTTGACTGGGTTG |
| | CTTTTTATGGTTTTGAAAAGGCAGCACTTTTTGCTTCTTTGGATGTAAAGCCATATGGTTACCCTAA |
| | TGATTTTGTTGGTGGTTTTAGAGTTCTTGGGACCACCGACAATAATTGTTGGGTTAATGCAACTTGT |
| | ATAATTTTACAGTATCTTAAGCCTACTTTTAAATCTGAGGGTTTAAATGTTCTTTGGAACAAATTTG |
| | TTACAGGTGATGTTNGACCTTTTGTTAGTTTTATTTATTTTATAACTATGTCTTCAAAGGGTCAAAA |
| | GGGTGATGCTGAAGAGGCATTATCTAAATTGTCAGAGTATTTGATTAGTGATTCTATTGTTACTCTT |
| | GAACAATATTCAACTTGTGACATTTGTAAAAGTACTGTAGTTGAAGTTAAAAGTGCTGTTGTTTGTG |
| | CTAGTGTGCTTAAAGATGGTTGTGATGTTGGTTTTTGTCCACACAGACATAAATTGCGTTCACGTGT |
| | TAAGTTTGTTAATGGACGTGTTGTTATTACCAATGTTGGTGAACCTATAATTTCACAACCTTCTAAG |
| | TTGCTTAATGGTATTGCTTATACAACATTTTCAGGTTCTTTTGATAACGGTCACTATGTAGTTTATG |
| | ATGCTGCTAATAATGCTGTCTATGATGGTGCTCGTTTGTTTGCTTCAGATTTGTCTACTTTAGCTGT |
| | TACAGCTATTGTTGTAGTAGGTGGTTGTGTAACATCTAATGTTTCACCAATTGTTAGTGAGAAAATT |
| | TCTGTTATGGATAAACTTGATACTGGTGCACAAAAATTTTTCCAGTTTGGTGATTTTGTTATGAATA |
| | ACATTGTTCTGTTTTTAACTTGGTTGCTTAGTATGTTTAGTCTTTTACGTACTTCTATTATGAAGCG |
| | TGATATTAAAGTTATTGCCAAGGCTCCTAAACGTACAGGTGTTATTTTGACACGTAGTTTTAAGTAT |
| | AACATTAAATCTGCTTTGTTTGTTGTAAAACAGAAGTGGTGTGTTATTGTTACTTTGTTTAAGTTCT |
| | TATTGTTATTATATGCTATTTATGCACTTGTTTTTATGATTGTGCAATTTAGTCCTTTTAATAGTCT |
| | TTTATGTGGTGACATTGTAAGTGGTTATGAAAAATCCACTTTTAATAAGGATATTTATTGTGGTAAT |
| | TCTATGGTTTGTAAGATGTGTTTGTTTAGGTATCAAGAGTTTAATGATTTGGATCATACTAGTCTTG |
| | TTTGGAAGCACATTCGTGATCCTATATTAATCAGTTTACAACCATTTGTTATACTTGTTATTTTGTT |
| | AATTTTTGGTAATATGTATTTGCGTTTTGGACTTTTATATTTTGTTGCACAATTTATTAGTACTTTT |
| | GGTTCTTTCTTAGGCTTTCATCAGAAACAGTGGTTTTTACATTTTGTGCCGTTCGATGTTTTATGTA |
| | ATGAGTTTTTAGCTACATTTATTGTCTGCAAAATTGTTTTATTTGTTAGACATATTATTGTTGGCTG |
| | TAATAATGCTGACTGTGTAGCTTGTTCTAAAAGTGCTAGACTTAAACGTGTACCACTTCAAACTATT |
| | ATTAATGGTATGCATAAATCATTCTATGTTAATGCTAATGGTGGTACTTGTTTCTGTAGTAAACATA |
| | ACTTCTTTTGTGTTAATTGTGATTCTTTTGGGCCTGGTAATACTTTTATTAATGGTGATATTGCAAG |
| | AGAGCTTGGTAATGTTGTTAAAACAGCTGTTCAACCCACAGCTCCTGCATATGTTATTATTGATAAG |
| | GTAGATTTTGTTAATGGATTTTATCGTCTTTATAGTGGTGACACTTTTTGGCGTTATGACTTTGACA |
| | TTACTGAATCTAAGTATAGTTGTAAAGAGGTTCTGAAGAATTGTAATGTTTTAGAAAATTTTATTGT |
| | TTACAATAATAGTGGTAGTAACGTTACACAGATTAAAAATGCTTGTGTTTATTTTTCTCAATTGTTG |
| | TGTGAACCNNNNNNNNNNNNNNNNNNNNNNNNGTTGTCAACTTTATCAGTTGATTTTAATGGTGTTT |
| | TGCATAAGGCATATGTTGATGTTTTGTGTAATAGTTTTTTTAAAGAGCTAACTGCTAACATGTCCAT |
| | GGCTGAATGTAAAGCTACACTTGGTTTGACTGTTTCTGATGATGATTTTGTTTCAGCTGTCGCCAAT |
| | GCACATAGGTATGACGTTTTGCTTTCAGATTTGTCATTTAATAATTTTTTTATTTCTTATGCTAAAC |
| | CTGAAGATAAGTTGTCCGTTTATGACATTGCTTGTTGTATGCGTGCCAGTTCTAAGGTTGTTAACCA |
| | TAATGTTTTAATCAAAGAGTCAATACCTATTGTTTGGGGTGTCAAGGACTTTAATACTCTTTCTCAA |
| | GAGGGTAAGAAGTACCTTGTTAAAACAACTAAAGCAAAGGGTTTGACTTTTCTATTAACTTTTAATG |
| | ACAACCAAGCAATTACACAAGTTCCTGCTACTAGTATAGTTGCAAAACAGGGTGCTGGTTTTAAACG |
| | TACTTATAATTTTCTATGGTATGTATGTTTATTTGTTGTTGCATTGTTTATTGGNNNCTCATTTATT |
| | GATTATACAACCACTGTAACTAGCTTTCATGGTTATGATTTTAAGTACATTGAGAATGGTCAGTTGA |
| | AGGTGTTTGAAGCACCTTTACACTGTGTTCGTAATGTTTTTGATAATTTTAATCAATGGCATGAGGC |
| | TAAGTTTGGTGTTGTTACTACTAATAGTGATAAATGTCCTATAGTTGTTGGTGTTTCAGAGCGTATT |
| | AATGTTGTTCCTGGTGTTCCAACAAATGTATATTTGGTAGGAAAGACTCTTGTTTTTACATTACAGG |
| | CTGCTTTTGGAAACACAGGTGTTTGTTATGACTTTGATGGTGTTACCACTAGTGATAAGTGTATTTT |
| | TAATTCTGCTTGTACTAGGTTGGAAGGTTTGGGTGGTGACAATGTTTATTGTTACAACACTGATCTT |
| | ATTGAAGGTTCTAAACCTTATAGTACTTTACAGCCTAATGCTTATTATAAGTATGATGTTAAAAATT |
| | ATGTACGTTTTCCAGAAATTTTAGCTAGAGGTTTTGGTTTACGTACTATTAGAACTTTGGCTACACG |
| | TTATTGTAGAGTTGGTGAATGCCGTGACTCACGTAAAGGTGTTTGTTTTGGTTTTGATAAATGGTAT |
| | GTTAATGATGGACGTGTTGATGACGGTTACATTTGTGGTGATGGTCTTATAGACCTTCTTGTTAATG |
| | TACTCTCAATCTTTAGTTCATCTTTTAGCGTTGTGGCTATGTCTGGACATATGTTGTTTAATTTTCT |
| | TTTTGCAGCATTTATTACATTTTTGTGCTTTTTAGTTACTAAATTTAAACGTGTTTTTGGTGATCTT |
| | TCTTATGGTGTTTTTACTGTTGTTTGTGCAACTTTGATTAATAACATTTCTTATGTTGTTACTCAAA |
| | ATTTATTTTTTATGTTGCTTTATGCTATTTTGTATTTTGTTTTTACTAGGACAGTGCGTTATGCTTG |
| | GATTTGGCATATTGCATATATTGTTGCATACTTCTTGTTAATACCATGGTGGCTTCTCACATGGTTT |
| | AGTTTTGCTGCATTTTTAGAGCTTTTACCTAATGTTTTTAAGTTAAAAATCTCTACTCAATTGTTTG |
| | AAGGTGATAAGTTTATAGGTACTTTTGAGAGTGCTGCTGCAGGTACATTTGTTCTTGACATGCGTTC |
| | TTATGAAAGGCTGATAAATACTATTTCACCTGAGAAACTTAAGAATTATGCTGCAAGTTATAATAAA |
| | TATAAATATTATAGTGGTAGTGCTAGTGAGGCTGACTATCGTTGTGCTTGTTATGCTCATTTAGCCA |
| | AGGCTATGTTAGATTACGCAAAAGATCATAATGACATGTTATATTCTCCACCTACCATTAGCTACAA |
| | TTCCACCTTACAATCTGGTCTTAAGAAGATGGCACAACCATCTGGTTGTGTTGAGAGATGTGTGGTT |
| | CGCGTCTGTTATGGTAGTACTGTGCTTAATGGAGTTTGGTTAGGTGACACTGTTACTTGTCCTAGAC |
| | ATGTCATAGCACCATCAACCACTGTTCTTATTGATTATGATCATGCATATAGTACTATGCGTTTGCA |
| | TAATTTTTCAGTGTCTTATAATGGTGTCTTCTTGGGAGTTGTTGGTGTTACAATGCATGGCTCTGTG |
| | TTGCGTATTAAGGTTTCACAATCTAATGTACATACACCTAAACATGTTTTTAAAACGTTGAAACCTG |
| | GTGATTCTTTTAATATTTTAGCATGTTATGAAGGTATTGCATCTGGTGTTTTTGGTGTTAATTTACG |
| | TACAAACTTTACTATTAAAGGTTCTTTTATAAATGGAGCTTGTGGTTCTCCTGGTTATAATGTTAGA |
| | AATGATGGTACTGTTGAGTTTTGTTATTTACACCAAATTGAGTTAGGTAGTGGTGCTCATGTTGGTT |
| | CTGATTTTACTGGTAGTGTTTATGGTAATTTTGATGACCAACCTAGTTTGCAAGTTGAGAGTGCCAA |
| | CCTTATGCTATCAGATAATGTTGTTGCCTTTTTGTACGCTGCTTTGTTGAATGGTTGTAGGTGGTGG |
| | TTGCGTTCAACTAGAGTTAATGTTGATGGTTTTAATGAATGGGCTATGGCTAATGGTTATACAAGTG |
| | TTTCTAGTGTTGAGTGCTATTCTATTTTGGCAGCAAAAACTGGTGTTAGTGTTGAACAATTGTTAGC |
| | TTCCATTCAACATCTTCATGAAGGTTTTGGTGGTAAAAACATACTTGGTTATTCTAGTTTATGTGAT |
| | GAGTTCACGCTAGCTGAAGTTGTGAAGCAGATGTATGGTGTTAACTTGCAAAGTGGTAAGGTTATTT |
| | TTGGTTTAAAAACAATGTTTTTATTTAGCGTTTTCTTCACAATGTTTTGGGCAGAACTCTTTATTTA |
| | TACAAACACTATATGGATAAACCCTGTGATACTTACACCTGTATTTTGTCTACTTTTGTTTTTGTCA |
| | TTATTTTTAACTATGTTTCTTAAACATAAGTTTTTGTTTTTGCAAGTATTTTTATTACCTACTGTTA |
| | TTGCAACTGCTTTATATAATTGTGTTTTGGATTATTACATAGTAAAATTTTTGGCTGACCATTTTAA |
| | CTATAATGTTTCAGTATTACAAATGGATGTTCAGGGTTTAGTTAATGTTTTGGTCTGTTTATTTGTT |
| | GTATTTTTACACACATGGCGCTTTTCTAAAGAACGTTTTACACATTGGTTTACATATGTGTGTTCTC |
| | TTATAGCAGTTGCTTACACTTATTTTTATAGTGGTGACTTTTTGAGTTTGCTTGTTATGTTTTTATG |
| | TGCTATATCTAGTGATTGGTACATTGGTGCCATTGTTTTTAGGTTATCACGTTTGATTGTAATTTTT |
| | TCACCTGAAAGTGTATTTAGTGTTTTTGGTGATGTGAAACTTACTTTAGTTGTTTATTTAATTTGTG |
| | GTTATTTAGTTTGTACTTATTGGGGCATTTTGTATTGGTTCAATAGGTTTTTTAAATGTACTATGGG |
| | TGTTTATGATTTTAAGGTGAGTGCTGCTGAATTTAAATACATGGTTGCTAATGGACTTCATGCACCA |
| | CATGGACCTTTTGATGCACTTTGGTTATCATTCAAACTACTTGGTATTGGTGGTGACCGTTGTATAA |
| | AAATTTCAACTGTCCAATCCAAACTGACTGATTTGAAGTGTACTAATGTTGTGTTATTGGGTTGTTT |
| | GTCTAGTATGAACATTGCAGCTAATTCTAGTGAATGGGCTTATTGTGTTGATTTACACAATAAGATT |
| | AATCTTTGTGATGACCCTGAAAAAGCTCAAGGTATGTTGTTAGCACTCCTTGCGTTCTTTCTAAGTA |
| | AACATAGTGATTTTGGTCTTGATGGCCTTATTGATTCTTATTTTGATAATAGTAGCACCCTTCAGAG |
| | TGTTGCTTCATCATTTGTTAGTATGCCATCATATATTGCTTATGAAAATGCTAGACAAGCTTATGAG |
| | GATGCTATTGCTAATGGATCTTCCTCTCAACTTATTAAACAATTGAAGCGTGCCATGAATATTGCAA |
| | AGTCTGAATTTGATCATGAGGTATCTGTTCAGAAGAAAATTAATAGAATGGCTGAACAAGCTGCTAC |
| | TCAGATGTATAAAGAAGCACGCTCTGTTAATAGAAAATCTAAAGTTATTAGTGCTATGCACTCTTTA |
| | CTTTTTGGAATGTTAAGACGTTTGGATATGTCTAGTGTTGAAACTGTTTTGAATTTAGCACGTGATG |
| | GTGTTGTGCCATTGTCAGTTATACCTGCAACTTCAGCTTCTAAACTAACTATTGTTAGTCCAGATCT |
| | TGAATCTTATTCTAAGATTGTTTGTGATGGTTCTGTTCATTATGCTGGAGTTGTTTGGACACTTAAT |
| | GATGTTAAAGACAATGATGGTAGACCTGTTCATGTTAAAGAGATTACAAAGGAAAATGTTGAAACTT |
| | TGACATGGCCTCTTATCCTTAATTGTGAACGTGTTGTTAAACTTCAAAATAATGAAATTATGCCTGG |
| | TAAACTTAAGCAAAAACCTATGAAAGCTGAGGGTGATGGTGGTGTTTTAGGTGATGGTAATGCCTTG |
| | TATAATACTGAGGGTGGTAAAACTTTTATGTATGCTTATATTTCTAATAAAGCTGACCTTAAATTTG |
| | TTAAGTGGGAGTATGAGGGTGGTTGCAACACAATCGAGTTAGACTCTCCTTGTCGATTTATGGTCGA |
| | AACACCTAATGGTCCTCAAGTGAAGTATTTGTATTTTGTTAAAAATTTAAATACCTTACGTAGAGGT |
| | GCCGTTCTTGGTTTTATAGGTGCCACAATTCGTCTACAAGCTGGTAAACAAACTGAATTGGCTGTTA |
| | ATTCTGGACTTTTAACTGCTTGTGCTTTTTCGGTTGATCCAGCAACTACTTACTTGGAGGCTGTTAA |
| | ACATGGTGCAAAACCTGTAAGTAATTGTATTAAGATGTTATCTAATGGTGCTGGTAATGGTCAAGCT |
| | ATAACAACTAGTGTAGATGCTAACACCAATCAAGATTCTTATGGTGGAGCATCTATTTGTTTGTATT |
| | GTCGGGCCCACGTTCCTCACCCTAGTATGGATGGTTACTGTAAGTTTAAGGGTAAATGTGTTCAGGT |
| | TCCTATTGGTTGTTTGGATCCTATTAGGTTTTGTTTAGAAAATAATGTGTGTAATGTTTGTGGTTGT |
| | TGGTTGGGACACGGGTGTGCTTGTGACCGTACAACTATTCAAAGTGTTGACATTTCTTATTTAAACG |
| | AGCAAGGGGTTCTAGTGCAGCTCGACTAGAACCCTGTAATGGCACGGACATCGATAAGTGTGTTCGT |
| | GTTTTTGACATTTATAATAAAAATGTTTCATTCTTGGGTAAGTGTTTGAAGATGAACTGTGTTCGTT |
| | TTAAAAATGCTGATCTTAAGGATGGTTATTTTGTTATAAAGAGGTGTACTAAGTCGGTTATGGAACA |
| | CGAGCAATCCATGTATAACCTACTTAACTTTTCTGGTGCTTTGGCTGAGCATGATTTCTTTACTTGG |
| | AAAGATGGCAGAGTCATTTATGGTAATGTTAGTAGACATAATCTTACTAAATATACTATGATGGACT |
| | TGGTCTATGCTATGCGTAACTTTGATGAACAAAATTGTGATGTTCTAAAAGAAGTATTAGTTTTAAC |
| | TGGTTGTTGTGACAATTCTTATTTTGATAGTAAGGGTTGGTATGACCCAGTTGAAAATGAGGATATA |
| | CATAGAGTTTATGCATCTCTTGGCAAAATTGTAGCTAGAGCTATGCTTAAATGCGTTGCTCTATGTG |
| | ATGCGATGGTTGCTAAAGGTGTTGTTGGTGTTTTAACATTAGATAACCAAGATCTTAATGGTAACTT |
| | TTATGATTTTGGTGATTTTGTTGTTAGCTTACCTAATATGGGTGTTCCCTGTTGTACATCATATTAT |
| | TCTTATATGATGCCTATTATGGGTTTAACTAATTGTTTAGCTAGTGAGTGTTTTGTCAAGAGTGATA |
| | TTTTTGGTAGTGATTTTAAAACTTTTGATTTGCTTAAGTATGATTTCACTGAACATAAAGAAAATTT |
| | ATTCAATAAGTACTTTAAGCATTGGAGTTTTGATTATCATCCTAATTGTAGTGACTGTTATGATGAT |
| | ATGTGTGTTATACATTGTGCTAATTTTAATACACTATTTGCTACAACTATACCAGGTACTGCTTTTG |
| | GTCCACTATGTCGTAAAGTTTTTATAGATGGTGTTCCACTTGTTACAACTGCTGGTTATCATTTTAA |
| | GCAATTAGGTTTGGTTTGGAATAAAGATGTTAACACACACTCAGTTAGGTTGACAATTACTGAACTT |
| | TTGCAATTTGTCACCGACCCTTCCTTGATAATAGCTTCTTCCCCAGCACTCGTTGATCAACGCACTA |
| | TTTGTTTTTCTGTTGCAGCATTGAGTACTGGTTTGACAAATCAAGTTGTTAAGCCAGGTCATTTTAA |
| | TGAAGAGTTTTATAACTTTCTTCGTTTAAGAGGTTTCTTTGATGAAGGTTCTGAACTTACATTAAAA |
| | CATTTCTTCTTCGCACAGAATGGTGATGCTGCTGTTAAAGATTTTGACTTTTACCGTTATAATAAGC |
| | CTACCATTTTAGAGATTTGTCAAGCTAGAGTTACATATAAGATAGTCTCTCGTTATTTTGACATTTA |
| | TGNAGGTGGCTGTATTAAGGCATGTGAAGTTGTTGTAACAAATCTTAATAAGAGTGCTGGTTGGCCA |
| | TTAAATAAGTTTGGTAAAGCTAGTTTGTATTATGAATCTATATCTTATGAAGAACAGGATGCTTTGT |
| | TTGCTTTGACAAAGCGTAATGTCCTCCCTACTATGACACAGCTGAATCTTAAGTATGCTATTAGTGG |
| | TAAAGAACGTGCTAGAACTGTTGGTGGTGTTTCTCTGTTGTCTACAATGACCACAAGACAATACCAT |
| | CAAAAACATCTTAAATCCATTGTTAATACACGCAATGCCACTGTTGTTATTGGTACTACCAAATTTT |
| | ATGGTGGTTGGAATAATATGTTGCGTACTTTAATTGATGGTGTTGAAAACCCTATGCTTATGGGTTG |
| | GGATTATCCCAAATGTGATAGAGCTTTGCCTAACATGATACGTATGATTTCAGCCATGGTGTTGGGC |
| | TCTAAACATGTTAATTGTTGTACTGCAACAGATAGGTTTTATAGGCTTGGTAATGAGTTGGCACAAG |
| | TTTTAACAGAAGTTGTTTATTCTAATGGTGGTTTTTATTTTAAGCCAGGTGGTACGACTTCTGGTGA |
| | CGCTAGTACAGCTTATGCTAATTCTATTTTTAACATTTTTCAAGCCGTGAGTTCTAACATTAACAGG |
| | TTGCTTAGTGTCCCATCAGATTCATGTAATAATGTTAATGTTAGGGATCTACAACGACGTCTGTATG |
| | ATAATTGCTATAGGTTAACTAGTGTTGAAGAGTCATTCATTGATGATTATTATGGTTATCTTAGGAA |
| | ACATTTTTCAATGATGATTCTCTCTGATGACGGTGTTGTCTGTTATAACAAGGATTATGCTGAGTTA |
| | GGTTATATAGCAGACATTAGTGCTTTTAAAGCCACTTTGTATTACCAGAATAATGTCTTTATGAGTA |
| | CTTCTAAATGTTGGGTTGAAGAAGATTTAACTAAGGGACCACATGAGTTTTGTTCCCAGCATACTAT |
| | GCAAATAGTTGACAAAGATGGTACCTATTATTTGCCTTACCCAGATCCTAGTAGGATCTTGTCAGCT |
| | GGTGTTTTTGTTGATGATGTTGTTAAGACAGATGCTGTTGTTTTGTTAGAACGTTATGTGTCTTTAG |
| | CTATTGATGCATACCCTCTTTCAAAACACCCTAATTCTGAATATCGCAAGGTTTTTTACGTATTACT |
| | TGATTGGGTTAAGCATCTTAACAAAAATTTGAATGAGGGTGTTCTTGAATCTTTTTCTGTTACACTT |
| | CTTGATAATCAAGAAGATAAGTTTTGGTGTGAAGATTTTTATGCTAGTATGTATGAAAATTCTACAA |
| | TATTGCAAGCTGCTGGTTTGTGTGTTGTTTGTGGTTCACAAACTGTACTTCGTTGTGGTGATTGTCT |
| | GCGTAAGCCTATGTTGTGCACTAAATGCGCATATGATCATGTATTTGGTACCGACCACAAGTTTATT |
| | TTGGCTATAACACCGTATGTATGTAATGCATCAGGTTGTGGTGTTAGTGATGTCAAAAAATTGTATC |
| | TTGGTGGTTTGAATTACTATTGTACAAATCATAAACCACAGTTGTCTTTTCCATTATGTTCAGCTGG |
| | TAATATATTTGGTCTATATAAAAATTCAGCAACTGGTTCCTTAGATGTTGAAGTTTTTAATAGGCTT |
| | GCAACGTCTGATTGGACTGATGTTAGGGACTATAAACTTGCTAATGATGTTAAAGATACACTTAGAC |
| | TCTTTGCGGCTGAAACTATTAAAGCTAAAGAAGAGAGTGTTAAGTCTTCTTATGCTTTTGCAACTCT |
| | TAAAGAGGTTGTTGGACCTAAAGAATTGCTTCTTAGTTGGGAAAGTGGTAAAGTTAAACCACCTTTG |
| | AATCGTAATTCTGTTTTCACCTGTTTTCAAATAAGTAAGGACTCAAAATTCCAAATAGGTGAGTTCA |
| | TCTTTGAGAAGGTTGAATATGGTTCTGATACTGTTACGTATAAGTCTACTGTAACTACTAAGTTAGT |
| | TCCTGGTATGATTTTTGTCTTAACATCTCACAATGTCCAACCTTTACGCGCACCAACTATTGCAAAC |
| | CAAGAGAAGTATTCTAGCATTTATAAATTGCACCCTGCTTTTAATGTCAGTGATGCATATGCTAATT |
| | TGGTTCCATATTACCAACTTATTGGTAAACAAAAGATAACTACAATACAGGGTCCTCCTGGTAGTGG |
| | TAAGTCACATTGTTCCATTGGACTTGGATTGTACTACCCAGGTGCGCGTATTGTTTTTGTTGCTTGT |
| | GCCCATGCTGCTGTTGATTCCTTATGTGCAAAAGCTATGACTGTTTATAGCATTGATAAGTGTACTA |
| | GGATTATACCTGCAAGAGCTCGGGTTGAGTGTTATAGTGGCTTTAAACCAAATAACACTAGTGCACA |
| | ATACATATTTAGCACTGTTAACGCATTACCTGAGTGTAATGCTGATATCGTTGTTGTAGATGAAGTT |
| | TCAATGTGTACAAATTATGAGCTTTCTGTTATTAATCAGCGTTTATCATATAAACATATTGTTTATG |
| | TTGGTGACCCACAACAACTTCCTGCACCTAGAGTAATGATTACTAAAGGTGTTATGGAGCCTGTTGA |
| | TTATAACGTTGTTACTCAACGTATGTGTGCTATAGGCCCTGATGTTTTTCTTCATAAATGTTATAGA |
| | TGTCCTGCTGAAATAGTTAATACAGTTTCTGAACTTGTTTATGAGAACAAGTTTGTCCCTGTTAAAC |
| | CTGCTAGTAAACAGTGTTTTAAAGTCTTTTTTAAGGGTAATGTACAGGTTGACAATGGTTCTAGTAT |
| | TAACAGAAAGCAGCTTGAAATAGTTAAGCTGTTTTTAGTTAAAAATCCAAGTTGGAGTAAGGCTGTG |
| | TTTATTNNNNNTTATAATAGTCAGAATTATGTTGCTAGTAGATTTTTAGGACTTCAAATTCAAACTG |
| | TTGATTCTTCTCAAGGTAGTGAGTATGATTATGTAATCTATGCACAAACTTCTGACACTGCACATGC |
| | TTGCAATGTAAACCGTTTTAATGTTGCTATAACACGTGCTAAGAAGGGTATATTTTGTGTAATGTGT |
| | GATAAAACTTTGTTTGATTCACTTAAGTTTTTTGAGATTAAACATGCAGATTTACATTCTAGCCAGG |
| | TTTGTGGCTTGTTTAAAAATTGTACACGCACTCCTCTTAATTTACCACCAACTCATGCACACACTTT |
| | CTTGTCGTTGTCAGATCAGTTTAAGACTACAGGTGATTTAGCTGTTCAAATAGGTTCAAATAACGTT |
| | TGTACTTATGAACATGTTATATCATTTATGGGTTTTAGGTTTGATATTAGTATTCCTGGTAGTCATA |
| | GTTTGTTTTGTACACGTGACTTTGCTATTCGTAATGTGCGTGGTTGGTTGGGTATGGATGTTGAAAG |
| | TGCTCATGTTTGTGGCGATAACATAGGTACTAATGTTCCTTTACAGGTTGGTTTTTCAAATGGTGTT |
| | AATTTTGTTGTGCAAACTGAAGGTTGTGTGTCTACCAATTTTGGTGATGTTATTAAACCTGTTTGTG |
| | CAAAATCTCCACCAGGTGAACAATTTAGACACCTTGTTCCTCTTTTACGTAAAGGACAACCTTGGTT |
| | AATTGTTCGTAGACGCATTGTGCAAATGATATCTGATTATTTGTCCAATTTGTCTGACATTCTTGTC |
| | TTTGTTTTGTGGGCAGGTAGTTTGGAATTAACTACAATGCGTTACTTTGTAAAAATAGGGCCAATTA |
| | AATATTGTTATTGTGGTAATTTTGCCACTTGTTATAATTCAGTTAGTAATGAATATTGTTGTTTTAA |
| | ACATGCATTGGGTTGTGATTATGTTTACAATCCGTATGCTTTTGATATACAACAGTGGGGTTATGTT |
| | GGTTCCTTGAGCCAAAACCACCACACATTCTGTAACATTCATAGAAACGAGCATGATGCTTCTGGTG |
| | ATGCTGTTATGACACGTTGTTTGGCAGTACATGATTGTTTTGTCAAAAATGTTGATTGGACTGTAAC |
| | GTACCCCTTTATTGCAAATGAGAAATTTATCAATGGCTGTGGGCGTAATGTCCAGGGACATGTTGTT |
| | CGTGCAGCCTTGAAATTGTATAAACCTAGTGTTATTCATGACATTGGTAATCCTAAAGGTGTACGTT |
| | GTGCTGTTACTGATGCCAAATGGTACTGTTATGACAAGCAACCTGTTAATAGTAATGTCAAGTTGTT |
| | GGATTATGATTATGCAACCCATGGTCAACTTGATGGTCTTTGTCTATTCTGGAATTGTAATGTTGAT |
| | ATGTATCCAGAATTTTCAATTGTGTGTCGTTTTGACACACGTACTCGTTCTGTTTTTAATTTAGAAG |
| | GTGTTAATGGTGGTTCTCTTTATGTTAACAAACATGCGTTTCATACACCAGCATATGATAAACGTGC |
| | TTTTGTTAAATTAAAACCTATGCCCTTTTTTTATTTTGATGACAGTGATTGTGATGTTGTGCAAGAA |
| | CAAGTTAATTATGTACCCCTTCGCGCTAGTAGTTGTGTTACCCGTTGTAATATAGGTGGTGCTGTTT |
| | GTTCAAAACATGCAAATTCGTATCAAAAATATGTTGAGGCATATAATACATTTACACAGGCAGGTTT |
| | TAACATTTGGGTACCACATAGTTTTGATGTTTATAATTTGTGGCAAATNNNNNNNNNNNNNNNNNNN |
| | NNNNNNNNNNNNNNNNNNGCATTTAATGTTGTAAAAAAAGGGTGTTTTACTGGTGTTGATGGTGAGT |
| | TACCTGTTGCAGTTGTTAACGACAAAGTTTTTGTTCGCTATGGCGATGTTGACAACTTGGTTTTCAC |
| | AAATAAAACAACATTGCCTACTAATGTTGCTTTTGAATTGTTTGCAAAACGAAAAATGGGTTTAACA |
| | CCACCATTGTCTATTCTCAAAAATCTCGGTGTTGTTGCTACATATAAATTTGTTTTATGGGATTATG |
| | AAGCTGAAAGACCTTTTACCTCATATACTAAGAGTGTATGTAAATACACTGATTTTAATGAGGATGT |
| | TTGTGTTTGTTTTGACAATAGTATTCAGGGTTCGTATGAGCGTTTTACGCTTACTACGAACGCTGTT |
| | TTATTTTCTACTGTTGTCATTAAAAATTTAACACCTATAAAGTTGAATTTTGGTATGTTGAATGGTA |
| | TGCCAGTTTCTTCTATTAAGGGTGATAAAGGTGTTGAAAAATTAGTTAATTGGTACATATATGTTCG |
| | TAAAAATGGTCAATTTCAAGATCATTATGATGGTTTTTACACTCAAGGTAGGAATTTATCAGACTTT |
| | ACACCAAGAAGTGATATGGAGTATGATTTTCTTAACATGGATATGGGTGTTTTTATTAATAAATATG |
| | GTCTTGAGGATTTTAATTTTGAACATGTTGTATATGGTGATGTTTCAAAAACTACATTAGGAGGTCT |
| | TCATTTGTTGATATCACAGTTTAGGCTTAGTAAAATGGGTGTTTTGAAAGCTGATGATTTTGTCACT |
| | GCTTCTGACACAACTTTGAGGTGCTGTACTGTTACTTATCTTAATGAACTTAGTTCAAAAGTTGTTT |
| | GTACTTATATGGATTTGTTGTTGGACGACTTTGTTACTATACTAAAGAGTTTAGATCTTGGTGTAAT |
| | ATCTAAAGTTCATGAAGTTATTATAGATAATAAACCTTATAGGTGGATGTTGTGGTGTAAAGATAAC |
| | CACTTGTCCACTTTTTATCCACAGTTGCAGTCTGCTGAATGGAAGTGTGGTTATGCTATGCCACAAA |
| | TTTATAAGCTTCAACGTATGTGTTTGGAACCTTGTAATTTGTGGCATTATGGTGCTGGTATTAAGTT |
| | GCCTAGTGGTATAATGTTAAATGTTGTTAAATACACTCAGCTTTGTCAATACCTAAATAGCACTACA |
| | ATGTGCGTACCTCATAATATGCGTGTTTTGCACTATGGTGCTGGTTCTGACAAAGGTGTGGCACCTG |
| | GTACAACTGTTTTAAAACGTTGGCTACCACCTGATGCAATAATCATTGATAATGATATCAATGATTA |
| | TGTTAGTGATGCAGATTTTAGCATTACAGGTGATTGTGCTACTGTTTATCTTGAAGATAAGTTTGAC |
| | TTACTTATTTCTGATATGTATGATGGTAGAATTAAATTTTGTGATGGTGAAAACGTCTCTAAAGATG |
| | GGTTTTTTACTTATCTTAATGGTGTTATTAGAGAAAAATTAGCTATTGGTGGTAGTGTTGCCATTAA |
| | GATTACAGAATATAGTTGGAATAAGTATCTTTATGAATTAATACAAAGATTTGCTTTTTGGACTTTG |
| | TTTTGCACGTCTGTTAACACATCCTCTTCGGAAGCTTTTCTTATTGGTATTAATTATTTAGGTGACT |
| | TTATTCAAGGTCCTTTTATAGCTGGTAACACTGTTCATGCTAATTATATATTTTGGCGTAATTCTAC |
| | TATTATGTCTTTGTCATACAATTCAGTTTTAGATTTAAGTAAGTTTGAATGTAAACATAAGGCCACT |
| | GTTGTTGTTACACTTAAAGATAATGATGTAAATGATATGGTTTTGAGTTTGATTAAGAGTGGTAGGT |
| | TGTTGTTACGCAATAATGGTCGTTTTGGTGGTTTTAGTAATCATTTAGTCTCAACTAAATGAAACTT |
| | TTCTTGATTTTGCTTGTTTTGCCCCTGGCCTCTTGCTTTTCCACATGTAATAGTAATGCTAATCTCT |
| | CTATGTTACAATTAGGTGTTCCTGACAATTCTTCAACTATTGTCACGGGTTTATTGCCAACTCATTG |
| | GATTTGTGCTAACCAGAGTACATCTGTTTACTCAGCCAATGGTTTCTTTTATATTGATGTTGGTAAT |
| | CACCGTAGTGCTTTTGCTCTCCATACTGGTTATTATGATGTTAATCAGTATTATATTTATGTTACTA |
| | ATGAAATAGGCTTAAATGCTTCTGTTACTCTTAAGATTTGTAAGTTTGGTAACACTACTTTTGATTT |
| | TTTAAGTAATTCTTCTAGTTCTTTTGACTGTATAGTTAATTTGTTATTTACAGAACAGTTAGGTGCG |
| | CCTTTGGGCATAACTATATCTGGTGAAACTGTGCGTCTGCATTTATATAATGTAACTCGTACTTTTT |
| | ATGTGCCAGCAGCTTATAAACTTACTAAACTTAGTGTTAAATGTTACTTTAACTATTCCTGTGTTTT |
| | TAGTGTTGTCAACGCCACCGTTACTGTGAATGTCACCACACATAATGGCCGTGTAGTTAACTACACT |
| | GTTTGTGATGATTGTAATGGTTATACTGATAACATATTTTCTGTTCAACAGGATGGCCGCATTCCTA |
| | ATGGTTTCCCTTTTAATAATTGGTTTTTGCTAACTAATGGTTCCACATTAGTGGACGGGGTCTCTAG |
| | ACTTTATCAACCACTCCGTTTAACTTGTTTATGGCCTGTACCTGGTCTTAAATCTTCAACTGGTTTT |
| | GTTTATTTTAATGCCACTGGTTCTGATGTTAATTGTAACGGCTATCAACATAATTCTGTTGCTGATG |
| | TTATGCGTTACAATCTTAACTTCAGTGCTAATTCTGTGGATAATCTCAAGAGTGGTGTTATAGTTTT |
| | CAAAACTCTACAGTACGATGTTTTGTTTTACTGTAGTAATTCCTCTTCGGGCGTTCTAGACACCACA |
| | ATACCTTTTGGCCCTTCCTCTCAACCTTATTACTGTTTTATAAATAGAACNATNAACACCACTCATG |
| | TTAGCACTTTTGTGGGTGTCTTACCACCCACTGTGCGTGAGATTGTTGTTGCTAGAACTGGTCAGTT |
| | TTATATTAATGGTTTTAAGTATTTTGATTTGGGTTTTATCGAAGCTGTTAATTTTAATGTCACAACT |
| | GCTAGTGCCACAGATTTTTGGACGGTTGCATTTGCTACTTTTGTTGATGTTTTGGTTAATGTTAGTG |
| | CAACTAAGATTCAAAACTTACTTTATTGCGATTCTCCATTTGAAAAGTTGCAGTGTGAGCACTTGCA |
| | GTTTGGATTGCAAGATGGTTTTTATTCTGCAAATTTTCTTGATGATAATGTTTTGCCTGAGACTTAT |
| | GTTGCACTCCCCATTTATTATCAACACACGGACATAAATTTTACTGCAACTGCATCTTTTGGTGGTT |
| | CTTGTTATGTTTGTAAACCACACCAGGTTAATTTATCTCTTAATGGTAACACTTCAGTGTGTGTTAG |
| | AACATCTCATTTCTCAATTAGGTATATTTATAACCGCGTTAAGAGTGGTTCACCAGGTGACTCTTCA |
| | TGGCACATTTATTTAAAGAGTGGCACTTGTCCATTTTCTTTTTCTAAGTTAAATAATTTTCAAAAGT |
| | TTAAGACTATTTGTTTTTCAACCGTCGCAGTGCCTGGTAGTTGTAATTTTCCACTTGAAGCCACCTG |
| | GCATTACACTTCTTATACTATTGTTGGTGCTTTGTATGTTACTTGGTCTGAAGGTAATTCTATTACT |
| | GGTGTACCTTATCCTGTCTNNNNNNNNNNNNNNNNNNNNNNNNNNNNNNNNNNNNNNNNNNNNNNNN |
| | NNNNNNNNNNNNNNNNNNNNNNNNNNNNNATTATACGTTCTTCAAACCAGTCACTTGCTGGTGGTAT |
| | TACATATGTTTCTAACTCTGGTAATTTACTTGGTTTTAAAAATGTTTCCACTGGTAACATTTTTATT |
| | GTGACACCATGTAACCAACCAGACCAAGTAGCTGTTTATCAACAAAGCATTATTGGTGCCATGACTG |
| | CTGTTAATGAGTCTAGATATGGCTTGCAAAACTTACTACAGTTACCTAACTTTTATTATGTTAGTAA |
| | TGGTAGTAACAATTGCACTACGGCCGTTATGACTTATTCTAATTTTGGTATTTGTGCTGATGGTTCT |
| | TTAATTCCTGTTCGTCTGCGCAATTCTAGTGATAATGGTATTTCAGCCATAATCACTGCTAATTTAT |
| | CTATTCCCTCTAACTGGACTACTTCAGTTCAAGTTGAGTACCTCCAAATTACTAGTACTCCAATAGT |
| | TGTTGATTGTGCTACTTATGTGTGTAATGGTAACCCTCGCTGTAAGAATCTACTTAAGCAGTATACT |
| | TCTGCTTGTAAAACTATTGAAGATGCCTTACGACTTAGTGCTCATTTGGAAACTAATGATGTTAGTA |
| | GTATGCTAACTTTCGATAGCAATGCTTTTAGTTTGGCTAATGTTACTAGTTTTGGAGATTATAACCT |
| | TTCTAGTGTTTTACCTCAGAGAAACATTCATTCAAGCCGTATAGCAGGACGTAGTGCTTTGGAAGAT |
| | TTGTTGTTTAGCAAAGTTGTTACATCTGGTTTGGGTACTGTTGATGTTGACTATAAGTCTTGTACTA |
| | AAGGTCTTTCTATTGCTGACCTTGCTTGTGCTCAGTACTACAATGGCATAATGGTTTTGCCAGGTGT |
| | TGCTGATGCTGAACGTATGGCCATGTACACAGGTTCTCTTATAGGTGGCATGGTGCTCGGAGGTCTT |
| | ACATCAGCAGCCGCCATACCTTTTTCTTTGGCACTGCAAGCACGACTTAATTATGTTGCTTTACAAA |
| | CTGATGTGCTTCAAGAAAATCAGAAAATTTTGGCTGCATCATTTAATAAGGCTATTAATAACATTGT |
| | TGCTTCTTTTAGTAGCGTTAATGATGCTATTACACAAACTGCAGAGGCTATACATACTGTTACTATT |
| | GCACTTAATAAGATTCAGGATGTTGTTAATCAACAGGGTAGTGCTCTTAACCATCTCACTTCACAAT |
| | TGAGACATAATTTTCAGGCCATTTCTAATTCAATTCAAGCTATTTATGACCGGCTTGATTCAATTCA |
| | AGCCGATCAACAAGTTGACAGATTAATTACTGGACGGCTTGCAGCTTTGAATGCATTTGTTTCCCAA |
| | GTTTTGAATAAATATACTGAAGTTCGTAGTTCCAGACGCTTAGCACAGCAGAAGATTAATGAATGTG |
| | TCAAATCACAATCTAATAGATATGGTTTTTGTGGCAATGGCACCCATATCTTTTCAATCGTCAACTC |
| | AGCTCCAGACGGTTTGCTTTTTCTTCATACTGTTTTGCTGCCAACCGACTACAAGAATGTAAAGGCG |
| | TGGTCGGGTATCTGTGTTGATGGCATTTACGGCTATGTTCTGCGTCAACCTAACTTGGTTCTTTATT |
| | CTGATAATGGTGTTTTTCGTGTAACTTCCAGGGTCATGTTTCAACCTCGTTTACCTGTTTTGTCTGA |
| | TTTTGTGCAAATATATAATTGTAATGTTACTTTTGTTAACATATCTCGTGTCAAGTTACATACTGTC |
| | ATACCTGACTACGTTGATGTTAATAAAACATTACAAGAGTTTGCACAAAATTTACCAAAGTATGTTA |
| | AGCCTAATTTTGACTTGACTCCTTTTAATTTAACATATCTTAATTTGAGTTCTGAGTTGAAGCAACT |
| | CGAAGCTAAAACTGCTAGTCTTTTCCAAACTACTGTTGAATTACAAGGTCTTATTGATCAGATTAAC |
| | AGTACATATGTTGACTTGAAGTTGCTTAATAGGTTTGAAAATTATATTAAATGGCCTTGGTGGGTTT |
| | GGCTCATTATTTCTGTTGTTTTTGTCGTATTGTTGAGTCTTCTTGTGTTTTGTTGTCTTTCTACAGG |
| | TTGTTGTGGTTGTTGCAATTGTTTAACTTCATCAATGCGAGGTTGTTGTGATTGTGGTTCAACTAAA |
| | CTTCCTTATTACGAATTTGAAAAGGTTCACGTTCAATAATGCCTTTCGGTGGCCTATTTCAACTTAC |
| | TCTTGAAAGTACTATTAATAAGAGTGTGGCTAATCTCAAATTACCACCTCATGATGTTACTGTCTTG |
| | CGTGACAATCTTAAACCTGTTACTACACTTAGTACTATCACTGCTTATTTGTTAGTTAGTTTGTTTG |
| | TCACTTATTTTGCTTTATTCAAACCTCTTACTGCTAGAGGTCGTGTTGCTTGTTTTGTTTTAAAACT |
| | ATTGACACTATTTGTCTATGTGCCTTTATTGGTTCTTTTTGGTATGTATCTTGACNNNNNNNNNNNN |
| | NNNNNNNCGCTGTTGTTTCGATTCATACATGTTGGCTATTATGCCTATCTCTATAAAAATTTTTCAT |
| | TTGTTTTGTTCAATGTTACTAAACTATGCTTCGTTTCAGGCAAGTGTTGGTATCTTGAACAATCATT |
| | TTATGAAAATCGTTTTGCTGCTATTTATGGTGGTGACCACTATGTCGTTTTAGGTGGTGAAACTATT |
| | ACTTTTGTTTCTTTTGATGACCTTTATGTTGCTATTAGAGGTTCTTGTGAAAAGAACCTACAACTTA |
| | TGCGTAAGGTTGACTTGTATAATGGTGCTGTCATTTACATTTTTGCCGAAGAGCCTGTTGTTGGTAT |
| | AGTCTACTCTTCTCAACTATACGAAGATGTTCCTTCGATTAATTGATGACAATGGCATTGTCCTCAA |
| | TTCTATTTTATGGCTCCTTGTTATGATATTTTTCTTTGTGTTGGCAATGACCTTTATTAAACTGATT |
| | CAATTGTGTTTTACTTGTCATTATTTTTTTAGTAGGACATTATATCAACCAGTTTATAAAATTTTTC |
| | TTGCTTACCAAGACTATATGCAAATAGCACCTGTTCCAGCTGAAGTATTAAATGTCTAAACTAAACG |
| | ATGTCTAATAGTAGTGTGCCTCTTTCAGAGGTTTATGTCCATTTACGTAACTGGAACTTTAGTTGGA |
| | ATTTAATTCTAACAGTTTTTATAGTTGTGTTGCAGTATGGGCATTATAAGTATAGCAGATTTCTTTA |
| | TGGTTTAAAGATGTCTGTTTTATGGTGTTTATGGCCACTTGTTCTAGCTTTGTCTATTTTTGACTGT |
| | TTTGTCAATTTTAATGTGGACTGGATCTTTTTTGGTTTTAGTATTCTTATGTCTATTATTACACTTT |
| | GTTTATGGGTTATGTATTTTGTTAATAGTTTCAGACTTTGGCGCCGTGTCAAAACTTTTTGGGCTTT |
| | TAATCCTGAAACTAATGCAATCATCTCTATCCAGGTTTATGGACATAATTACTACTTACCGGTGATG |
| | GCTGCACCTACAGGTGTTACATTAACACTTCTTAGTGGTGTACTTCTTGTTGATGGCCACAAGATTG |
| | CTACTCGTGTTCAAGTGGGTCAGTTGCCTAAATATGTAATAGTTGCTACACCTAGTACCACAATTGT |
| | TTGTGACCGTGTTGGTCGCTCTGTTAATGAAACAAGCCAGACTGGTTGGGCATTCTACGTCCGTGCT |
| | AAACATGGTGATTTTTCTGGTGTTGCCTCTCAGGAGGGTGTTTTGTCAGAAAGAGAGAAGTTGCTTC |
| | ATTTAATCTAAACTAAACAAAATGGCTAGTGTAAATTGGGCCGATGACAGAGCTGCTAGGAAGAAAT |
| | TTCCTCCTCCTTCATTTTACATGCCTCTTTTGGTTAGTTCTGATAAGGCACCATATAGGGTCATTCC |
| | CAGGAACCTTGTCCCTATTGGTAAGGGTAATAAAGATGAGCAGATTGGTTATTGGAATGTTCAAGAG |
| | CGTTGGCGTATGCGCAGGGGGCAACGTGTTGATTTGCCTCCTAAAGTTCATTTTTATTACCTAGGTA |
| | CTGGACCTCATAAGGACCTTAAATTCAGACAACGTCTTGATGGTGTTGTTTGGGTTGCTAAGGAAGG |
| | TGCTAAAACTGTTAATACCAGTCTTGGTAATCGCAAACGTAATCAGAAACCTTTGGAACCAAAGTTC |
| | TCTATTGCTTTGCCCCCAGAGCTCTCTGTTGTTGAGTTTGAGGATCGCTCTAATAACTCATCTCGTG |
| | CTAGCAGTCGTTCTTCAACTCGTAACAACTCACGAGACTCTTCTCGTAGTACTTCAAGACAACAGTC |
| | TCGCACTCGTTCTGATTCTAACCAGTCTTCTTCAGATCTTGTTGCTGCTGTTACTTTGGCTTTAAAG |
| | AACTTAGGTTTTGATAACCAGTCGAAGTCACCTAGTTCTTCTGGTACTTCCACTCCTAAGAAACCTA |
| | ATAAGCCTCTTTCTCAACCCAGGGCTGATAAGCCTTCTCAGTTGAAGAAACCTCGTTGGAAGCGTGT |
| | TCCTACCAGAGAGGAAAATGTTATTCAGTGCTTTGGTCCTCGTGATTTTAATCACAATATGGGGGAT |
| | TCAGATCTTGTTCAGAATGGTGTTGATGCCAAAGGTTTTCCACAGCTTGCTGAATTGATTCCTAATC |
| | AGGCTGCTTTATTCTTTGATAGTGAGGTTAGCACTGATGAAGTGGGTGATAATGTTCAGATTACCTA |
| | CACCTACAAAATGCTTGTAGCTAAGGATAATAAGAACCTTCCTAAGTTCATTGAGCAGATTAGTGCT |
| | TTTACTAAACCCAGTTCTATCAAAGAAATGCAGTCACAATCATCTCATGTTGTTCAGAACACAGTAC |
| | TTAATGCTTCTATTCCAGAATCTAAACCATTGGCTGATGATGACTCAGCCATTATAGAAATTGTCAA |
| | CGAGGTTTTGCATTAAATTGTTTTGTAATTCCAGTTGAATGTTTATTATTATTAGTTGCAACCCCAT |
| | GCGTTTAGCGCATGATAAGGGTTTAGTCTTACACACAATGGTAGGCCAGTGATAGTAAAGTGTAAGT |
| | AATTTGCTATCATATTAACATGTCTAGAGGAAAGTCAGAACTTTTTCTGTTTGTGTTGTTGGAGTAC |
| | TTAAAGATCGCATAGGCGCGCCAACAATGGAAGAGCCAACAACATATCTAAAAATGTTTTGTCTGGT |
| | ACTTGTTAATGATA |
| 9 | GenBank Accession No. MN369046.1 (Human coronavirus 229E strain |
| | HCoV_229E/Seattle/USA/SC9724/2018, complete genome) |
| | GTGCTGTGTGTTCTAGTCTAAGGGTTTCGTGTTCCGTCACGAGATTCCATTCTACAAACGCCTTACG |
| | CGAGGTTCTGTCTCGTGTTTGTGTGGAAGCAAAGTTTTGTCTTTGTGGAAACCAGTAACTGTTCCTA |
| | ATGGCCTGCAACCGTGTGACACTTGCCGTAGCAAGTGATTCTGAAATTTCTGCATATGGCTGTTCTA |
| | CTATTGCGCAAGCCGTCCGCCGTTATAGCGAGGCCGCTAGCAATGGTTTTAGGGCATGCCGATTTGT |
| | TTCATTAGATTTGCAGGATTGCATCGTTGGCATTGCAGATGATACATATGTTATGGGTCTGCATGGC |
| | AATCAGACGTTGTTTTGCAACATAATGAAATTTTCTGACCGTCCTTTTATGCTTCATGGGTGGTTGG |
| | TTTTTTCCAATTCAAATTACCTTTTGGAGGAATTTGATGTTGTCTTCGGTAAGAGAGGTGGTGGTAA |
| | TGTGACATACACTGACCAGTATCTCTGTGGCGCCGATGGCAAACCTGTTATGAGTGAAGATTTATGG |
| | CAGTTTGTTGACCATTTCGGTGAGAACGAAGAAATTGTCATCAATGGTCGTACTTACGTTTGTGCGT |
| | GGCTTACTAAGCGTAAGCCCTTAGATTACAAACGTCAGAACAACCTCGCCATTGAAGAGATTGAATA |
| | CGTGCATGGTGATGCTTTGCACACACTACGCAATGGTTCTGTTCTTGAAATGGCTAAGGAAGTGAAG |
| | ACATCTAGTAAAGTTGTGTTAAGCGATGCTCTTGACAAACTTTACAAAGTCTTTGGTTCTCCTGTTA |
| | TGACAAATGGTTCCAACATCCTAGAGGCCTTTACTAAACCTGTGTTTATTAGTGCATTAGTTCAATG |
| | TACTTGTGGTACCAAGTCTTGGTCTGTGGGTGATTGGACCGGTTTTAAATCCTCTTGTTGCAACTTG |
| | ATCAGTAATAAACTGTGTGTTGTGCCTGGTAATGTTAAACCTGGTGATGCTGTGATTACTACTCAGC |
| | AAGCTGGTGCTGGTGTTAAGTATTTTTGTGGCATGACTCTTAAGTTTGTTGCAAATATTGAAGGTGT |
| | CTCTGTTTGGAGAGTGATTGCTCTTCAGAGTGTTGATTGCTTTGTTGCTTCTTCCACTTTTGTAGAA |
| | GAGGAACATGTTAATAGAATGGACACATTCTGCTTCAATGTACGCAATAGTGTTACTGATGAGTGTC |
| | GTCTGGCCATGTTGGGTGCTGAAATGACTAGTAATGTCAGAAGACAAGTTGCTTCAGGTGTCATAGA |
| | CATTAGTACCGGCTGGTTTGATGTTTATGATGACATCTTTGCTGAAAGCAAACCATGGTTTGTTCGC |
| | AAGGCTGAAGACATTTTTGGCCCTTGTTGGTCTGCTCTTGTTTCTGCACTTAAACAACTTAAAGTCA |
| | CTACAGGTGAACTTGTGAGATTTGTTAAGTCTATTTGCAATTCAGCTGTTGCTGTCGTGGGTGGTAC |
| | TATACAAATTCTCGCTAGTGTGCCTGAGAAGTTTTTGAATGCGTTTGACGTGTTTGTCACAACTATT |
| | CAAACTGTCTTTGACTGTGCTGTTGAAACTTGTACTATTGCCGGTAAAGCATTTGACAAGGTTTTTG |
| | ACTATGTCTTGCTTGATAATGCGCTTGTAAAACTTGTCACCACAAAGCTTAAGGGTGTTCGTGAAGG |
| | TGGCCTTAATAAAGTTAAGTATGCAACAGTTGTTGTTGGTTCCACTGAAGAAGTTAAATCTTCACGT |
| | GTTGAACGTAGCAATGCTGTACTTACAATCGCCAACAATTATTCCAAACTTTCTGATGAAGGGTATA |
| | CTGTTGTAATTGGCGATGTGGCGTACTTTGCTAGTGACGGCTACTTCCGTCTTATGGCCAATCCAAA |
| | TAGTGTGTTGACTACTGCAGTCTATAAACCATTGGTTGATTTTAATGTGAATGTTATTGGTACTAGA |
| | CCTGAAAAATTTCCAACCACTGTGACTTGTGAAAATTTAGAGTCTGCTGTTTTGTTTGTTAATGACA |
| | AAATCACTGAATTCCAATTGGATTACAGTATTGATGTCATTGATAATGAAATAATTGTCAAACCTAA |
| | TATCAGCTTATGTGTTCCACTTTATGTGAGAGACTATGTTGACAAATGGGATGATTTTTGCAGACAA |
| | TATAGTAACGAGTCTTGGTTTGAGGATGATTACAAGGCTTTTATCAGTGTTTTGGATATCACTGATG |
| | CTGCTGTGAAAGCTGCAGAATCTAAAGCCTTCGTTGATACTATTGTTCCACCTTGCCCATCTATTTT |
| | GAAAGTTATAGATGACGGCAAAATATGGAATGGTGTTATTAAAAATGTTAACTATGTTAGAGACTGG |
| | CTTAAGTCGTTGAAGTTAAATCTCACACAACAGGGTTTGCTTGGAACATGTGCAAAGCGTTTTAAAC |
| | GTTGGCTTGGCATTTTGCTAGAGGCCTATAATGCGTTTTTAAACACTGTTGTTTCTACTGTTAAAAT |
| | TGGTGGTTTGACCTTTAAAACATATGCTTTTGATAAAACTTACATTGTGATACGTGATATCGTGTGT |
| | AAGGTTGAAAATAAAACAGAAGCAGACTGGATTGAACTTTTTCCACATAATGACAGGATTAAGTCCT |
| | TTAGTACTTTTGAGAGTGCTTACATGCCAATTGCAGACCCTACACATTTTGACATTGAAGAAGTTGA |
| | ACTTTTAGATGCAGAGTTTGTAGAACCAGGCTGTGGTGGTATTTTGTCAGTAATAGATGAGCACGTC |
| | TTTTATAAGAAGGATGGTGTTTATTATCCATCAAATGGTACTAACATTCTACCTGTTGCATTTACAA |
| | AAGCCGCTGGTGGTAAAGTTTCATTTTCTGATGACGTTGAAGTAAAAGACATTGAACCTGTTTACAG |
| | AGTCAAGCTTTGCTTTGAGTTTGAAGATGAAAAACTTGTAGATGTTTGTGAAAAGGCAATTGGCAAG |
| | AAAATTAAACATGAAGGTGACTGGGATAGCCTTTGTAAGACTATTCAATCAGCACTTTCTGTTGTTT |
| | CATGCTATGTAAATCTGCCTACTTATTACATTTATGATGAAGAAGGCGGTAATGACTTGAGTTTGCC |
| | CGTTATGATTTCTGAATGGCCTCTTTTTGAGTCAGATAAGGAAGAAGATGTTCAACAAGCTCAACAA |
| | GAAGCTACTCATATTGCTGAGGATGTTGTTGACCAAGTTGAAGAAGTCAATAGCATTTTTGACATTG |
| | AGACAGTGGATGTTAAACATGAGATGAGTCCTTTTGAAATGCCATTTGAAGAGTTAAATGGTTTAAA |
| | GATACTTAAACAATTGGATAACAACTGCTGGGTTAACTCAGTTATGTTACAAATACAATTAACTGGT |
| | ATACTTGATGGTGATTATGCTATGCAGTTTTTTAAAATGGGCCGAGTTGCCAAGATGATTGAACGCT |
| | GCTACACTGCTGAGCAATGTATACGTGGTGCTATGGGTGATGTTGGTTTGTGTATGTATAGACTTCT |
| | TAAAGACTTACACACTGGTTTTATGGTTATGGATTATAAATGTAGTTGTACCAGTGGTAGGCTTGAA |
| | GAATCGGGAGCTGTTTTGTTTTGTACGCCCACTAAGAAGGCGTTTCCTTATGGTACTTGTCTAAATT |
| | GTAACGCACCTCGCATGTGTACAATTAGGCAGTTACAAGGTACCATAATATTTGTGCAACAAAAACC |
| | AGAACCTGTTAACCCTGTTTCTTTTGTTGTTAAACCAGTCTGCTCATCAATTTTTCGTGGTGCTGTG |
| | TCTTGTGGTCATTACCAGACTAACATCTATTCACAAAATTTGTGTGTGGATGGTTTTGGTGTTAACA |
| | AGATTCAGCCCTGGACAAATGATGCACTTAATACTATTTGTATTAAGGATGCAGATTATAATGCAAA |
| | AGATGAAATATCTGTTACACCAATTAAAAACACAGTTGATACAATACCTAAGGAAGAATTTGTTGTT |
| | AAAGAGAAGTTGAACGCCTTCCTCGTTCATGGCAATGTAGTTTTCTACCAAGGTGATGTTGATACCG |
| | TTGTTAATGGTGTTGACTTTGACTTTATTGTAAATGCTGCTAATGAGAACCTTGCTCATGGTGGAGG |
| | ACTTGCCAAAGCTTTAGATGTGCACACTAAAGGTAAACTTCAACGTTTATCCAAAGAACACATTGGA |
| | TTAGCGGGTAAAGTAAGAGTTGGTACAGGAGTTATGGTTGAGTGTGATAGCCTTAGAATTTTTAATG |
| | TTGTTGGTCCACGCAAGGGTAAACATGAACGTGATTTACTCGTAAAAGCTTACAACACTATTAATAA |
| | CGAACAAGGCACACCTTTAACACCAATTTTGAGTTGTGGTATTTTTGGTGTCAAACTCGAAACTTCA |
| | TTGGAAGTTTTGCTTGATGTTTGTAATACAAAAGAAGTTAAAGTTTTTGTTTATACAGACACAGAAG |
| | TTTGTAAGGTTAAGGATTTTGTGTCTGGTTTAGTGAATGTTCAAAAAGTTGCACAACCTAAAATAGA |
| | ACAAAAACCAGTGTCCTTAATTAAAGTTGCACCCAAGCCTTACAGGGTAGATGGTAAATTTAGTTAC |
| | TTTACAGAAGACTTGTTGTGTGTCGCTGATGACAAACCCATTGTTTTGTTTACTGACTCTATGCTTA |
| | CTTTGGATGACCGTGGTTTGGCTCTAGACAATGCACTTAGTGGTGTGCTTAGTGCTGCTATTAAGGA |
| | TTGTGTTGACATAAATAAAGCTATACCTTCTGGTAATCTTATTAAGTTTGACATAGATTCTGTTGTT |
| | GTTTACATGTGTGTTGTGCCATCCGAAAAGGACAAACATTTAGATAATAATGTTCAACGATGCACAC |
| | GTAAGTTGAATAGACTTATGTGTGATATAGTTTGTACTATACCAGCTGACTACATCTTGCCATTGGT |
| | GTTGTCTAGTTTGACTTGTAATGTTTCTTTTGTAGGTGAACTTAAAGCTGCTGAAGCTAAAGTTATA |
| | ACTATAAAGGTGACAGAGGATGGTGTTAATGTTCATGATGTGACCGTGACAACAGATAAGTCATTTG |
| | AACAACAAGTTGGTGTTATTGCTGACAAGGACAAAGATCTTTCTGGTGCAGTACCCAGTGATCTTAA |
| | CACATCTGAATTGCTTACTAAAGCAATAGATGTTGATTGGGTCGAATTTTATGGCTTTAAAGATGCT |
| | GTTACTTTTGCAACAGTTGATCATAGTGCTTTTGCCTATGAAAGTGCTGTTGTTAATGGTATTAGAG |
| | TGTTAAAAACCAGTGATAATAATTGTTGGGTGAATGCTGTTTGTATTGCACTACAGTATTTGAAACC |
| | TCATTTTATTTCACAAGGTCTTGATGCTGCGTGGAATAAATTTGTTTTAGGCGATGTTGAAATTTTT |
| | GTTGCATTTGTTTACTATGTTGCAAGACTAGTGAAAGGTGACAAGGGTGATGCTGAAGACACTTTGA |
| | ATAAGTTGTCTAAGTATCTTGTTAATGAAGCTCAAGTTCAATTAGAACATTATAGTTCTTGTGTTGA |
| | ATGTGATGCTAAATTTAAAAACTCTGTTACATCTATCAATTCTGCTATAGTTTGTGCTAGTGTCAAA |
| | CGTGATGGTGTGCAAGTTGGTTATTGTGTCCATGGTATTAAGTACTATTCACGTGTTAAAAGTGTTA |
| | GAGGTAGAGCTATTATAGTCAGTGTCGAACAGCTTGAACCGTGTGTTCAGTCTAGACTTTTGAGTGG |
| | TGTTGCTTATACTGCTTTTTCTGGACCTGTTGATAAAGGTCATTATACTGTTTATGACACTGCAAAG |
| | AAATCAATGTATGATGGTGATCGTTTTGTTAAACATGATCTTTCTCTGCTGTCTGTCACATCAGTTG |
| | TTATGGTTGGTGATTATGTTGCACCTGTTAGTACAGTGAAACCTAAACCAGTCATTTCTCAACTTGA |
| | TGAAAATGCACAGAAGTTCTTTGATTTTGGTGATTTTTTGGTTCATAATTTTGTTATTTTTTTCACA |
| | TGGTTATTGAGTATGTTTACTTTGTGTAAAACTGCAGTAACTACATGTGATGTTAAAATAATGGCCA |
| | AAGCACCACAAAGGACGGGTGTTGTTTTAAAACGTAGTCTTAAATATAACTTAAAAGCGTCAGCAGC |
| | TGTTCTTAAATCTAAGTGGTGGCTGCTTGCTAAGTTTACGAAACTACTGTTACTTATATATACATTG |
| | TATTCAGTAGTTTTGTTTTGTGTACGTTTTGGACCGTTTGAGTTTTGTAGTGAGACTGTTAATGGTT |
| | ATGCTAAGTCAAACTTTGTCAAGGATGATTACTGTGATGGTTCATTGGGCTGCAAGATGTGTCTTTT |
| | TGGTTATCAAGAGCTAAGTCAATTTAGCCATTTGGATGTTGTGTGGAAGCATATAACAGACCCTTTG |
| | TTTAGTAATATACAACCTTTCATTGTTATGGTTTTGCTGCTTATATTTGGTGACAATTATTTGAGAT |
| | GCTTCTTGCTGTATTTTGTTGCTCAGATGATAAGCACAGTTGGTGTTTTTCTAGGTTATAAGGAAAC |
| | AAATTGGTTCTTGCACTTTATTCCATTTGATGTTATTTGTGATGAACTGTTTGTCACTGTTATTGTT |
| | ATTAAGGTTATTTCTTTTGTCAGACATGTGCTTTTTGGTTGTGAAAACCCAGATTGCATTGCGTGTT |
| | CTAAGAGTGCTAGACTTAAGAGATTCCCTGTTAACACAATTGTTAATGGTGTGCAACGTTTATTTTA |
| | TGTTAATGCAAATGGTGGTAGTAAGTTTTGTAAGAAACATAGATTTTTCTGTGTTGACTGTGACTCT |
| | TATGGTTATGGCAGCACGTTTATAACACCTGAAGTTTCTAGAGAACTTGGTAACATTACTAAAACAA |
| | ATGTGCAACCAACAGGTCCAGCGTATGTCATGATTGACAAAGTGGAGTTTGAAAATGGTTTTTACAG |
| | GTTGTATTCCGGTGAAACATTTTGGCGTTACAACTTTGATATAACTGAAAGCAAGTATTCTTGCAAA |
| | GAGGTTTTTAAAAATTGTAATGTTTTGGATGATTTCATCGTGTTTAACAATAATGGGACCAATGTAA |
| | CGCAGGTTAAAAATGCTAGTGTTTACTTTTCACAGTTGTTGTGTAGGCCCATTAAATTAGTTGACAG |
| | TGAACTTTTGTCCACTTTGTCAGTTGATTTTAATGGTGTCTTACACAAGGCATACATCGATGTACTA |
| | CGTAATAGCTTTGGTAAAGATCTTAATGCTAATATGTCTTTAGCCGATTGCAAGAGTGCTTTAGGCC |
| | TGTCTATTAGTGATCATGAATTTACTAGTGCTATTTCTAATGCACATCGTTGTGACGTGTTGTTATC |
| | TGATTTGTCATTTAACAACTTTGTCAGTTCGTATGCTAAACCTGAGGAAAAATTATCAGCTTATGAC |
| | TTGGCGTGTTGTATGCGTGCAGGTGCTAAGGTTGTTAATGCCAATGTTCTGACAAAGGACCAAACTC |
| | CTATTGTTTGGCATGCAAAGGATTTTAACAGTCTTTCTGCTGAAGGTCGTAAGTATATTGTAAAAAC |
| | TAGCAAAGCTAAGGGTTTGACTTTCTTGTTGACAATTAATGAAAACCAAGCTGTTACGCAAATACCT |
| | GCAACTAGCATTGTTGCTAAGCAAGGTGCTGGTGATGCTGGTCATTCATTAACATGGCTGTGGTTAC |
| | TGTGTGGTCTTGTGTGTTTGATTCAATTCTATTTGTGCTTTTTCATGCCCTATTTTATGCACGATGT |
| | AGTGAGTAGTTTTGAGGGTTATGATTTTAAGTATATAGAAAATGGTCAGTTGAAGAATTTTGAAGCG |
| | CCACTTAAATGTGTCAGAAACGTTTTTGAAAACTTTGAGGACTGGCATTATGCTAAGTTTGGCTTCA |
| | CACCTTTAAACAAGCAAAGCTGTCCTATTGTAGTTGGAGTTTCTGAAATTGTTAATACTGTCGCTGG |
| | CATTCCATCTAATGTGTATCTTGTTGGTAAAACTTTAATTTTTACACTACAAGCTGCTTTTGGTAAT |
| | GCTGGTGTTTGTTATGACATTTTTGGAGTCACAACACCTGAAAAGTGCATTTTTACTTCTGCTTGTA |
| | CTAGATTAGAAGGTTTGGGTGGTAACAATGTTTATTGTTATAACACAGAGCTTATGGAAGGTTCTTT |
| | GCCGTACAGTTCAATACAAGCTAATGCATATTATAAATATGATAATGGCAATTTTATTAAGTTGCCA |
| | GAAGTTATTGCACAAGGCTTTGGCTTTAGAACAGTACGTACTATTGCTACCAAATACTGCCGCGTAG |
| | GTGAATGTGTTGACTCCAATGCAGGTGTGTGTTTTGGCTTTGACAAGTGGTTTGTTAATGATGGACG |
| | TGTTGGCAATGGTTACGTTTGTGGTACTGGTTTGTGGAACCTTGTATTTAACATACTTTCCATGTTC |
| | TCATCTTCATTCTCTGTTGCTGCAATGTCAGGTCAAATTTTACTTAATTGTGCATTAGGTGCTTTTG |
| | CTATCTTTTGTTGTTTTCTTGTGACAAAGTTTAGACGCATGTTTGGTGACCTTTCTGTAGGTGTTTG |
| | TACTGTTGTTGTTGCTGTTTTGCTTAACAATGTCTCTTACATTGTAACTCAGAATCTAGTAACAATG |
| | ATTGCTTATGCCATATTGTATTTCTTTGCTACTAGAAGCTTACGCTATGCATGGATTTGGTGTGCTG |
| | CATATTTAATTGCGTATATTTCTTTTGCTCCATGGTGGTTGTGTGCTTGGTACTTTCTTGCTATGTT |
| | GACAGGTTTGTTACCTAGTTTGCTGAAGCTTAAAGTTTCGACAAATCTTTTCGAAGGTGACAAATTT |
| | GTAGGTACATTTGAAAGTGCTGCTGCAGGAACATTTGTCATTGACATTCGTTCTTATGAGAAACTTG |
| | CTAATAGCATCTCTCCAGAAAAGTTGAAAAGTTATGCTGCTAGCTATAATAGATACAAGTACTATAG |
| | TGGTAATGCAAATGAAGCTGATTACCGTTGTGCTTGTTATGCCTATTTAGCAAAAGCAATGTTGGAC |
| | TTTTCGCGTGATCATAATGACATCTTGTACACACCTCCGACTGTCAGTTATGGTTCTACATTACAGG |
| | CTGGTTTGCGCAAAATGGCACAACCATCTGGCTTTGTGGAAAAATGTGTTGTCCGTGTCTGCTATGG |
| | AAACACTGTGTTGAATGGGTTGTGGCTTGGTGATATTGTTTATTGCCCACGTCATGTTATCGCATCT |
| | AACACAACTTCTGCTATAGATTATGATCACGAATATAGTATTATGCGGTTGCATAATTTCTCTATAA |
| | TATCTGGTACAGCATTTCTTGGTGTTGTAGGTGCTACTATGCATGGAGTAACTCTTAAAATTAAGGT |
| | TTCACAGACTAACATGCACACACCTAGACACTCTTTTAGAACACTAAAATCTGGTGAAGGTTTTAAC |
| | ATCTTAGCATGCTATGATGGTTGTGCTCAGGGTGTTTTTGGTGTGAACATGAGAACTAATTGGACTA |
| | TCCGTGGTTCATTTATTAATGGTGCGTGTGGTTCTCCTGGCTATAATCTTAAAAATGGCGAGGTGGA |
| | ATTTGTTTATATGCATCAAATTGAACTCGGAAGTGGTAGTCATGTAGGTTCTAGCTTTGATGGTGTT |
| | ATGTATGGTGGTTTTGAAGACCAACCTAATCTTCAAGTTGAATCTGCAAACCAGATGTTAACAGTTA |
| | ATGTGGTTGCATTTCTTTATGCTGCTATATTGAATGGTTGCACATGGTGGCTTAAAGGTGATAAATT |
| | GTCTGTGGAGCATTATAATGAGTGGGCACAGGCTAATGGTTTCACAGTTATGAATGGTGAAGACGCT |
| | TTTTCCATTCTTGCTGCTAAAACTGGTGTCTGTGTGGAAAGATTACTTCATGCTATTCAAGTTTTGA |
| | ATAATGGATTTGGTGGTAAACAAATTTTGGGTTATTCTAGTCTCAATGATGAGTTCAGTATTAATGA |
| | AGTTGTCAAACAAATGTTTGGTGTTAACCTGCAAAGTGGTAAAACCACTAGTATGTTTAAATCCATA |
| | AGCTTGTTTGCTGGTTTCTTTGTCATGTTCTGGGCTGAATTATTTGTTTATACCACCACTATTTGGG |
| | TTAACCCTGGTTTTCTTACTCCTTTTATGATTTTGCTTGTTGCTTTGTCACTCTGTCTTACATTTGT |
| | TATTAAACATAAGGTTTTGTTTTTGCAAGTGTTTTTGTTGCCTTCAATTATTGTGGCTGCTATTCAA |
| | AACTGTGCTTGGGACTACCATATTACAAAGGTGTTGGCAGAGAAGTTTGATTATAATGTTTCTGTTA |
| | TGCAAATGGATATCCAGGGTTTTGTTAACATTTTTATTTGTCTTTTTGTTGCACTGTTGCATACTTG |
| | GCGCTTTGCTAAAGAGCGTTGTACACATTGGTGCACTTATTTGTTCTCACTCATTGCTGTTTTATAC |
| | ACTGCATTGTATAGTTATGACTACGTTAGTTTGCTGGTTATGCTACTTTGTGCAATTTCTAATGAAT |
| | GGTATATTGGTGCTATCATTTTTAGAATTTGTCGTTTTGGTGTTGCATTTTTACCAGTGGAATACGT |
| | GTCTTACTTTGATGGTGTTAAAACTGTGCTGTTGTTTTACATGTTGTTAGGCTTTGTTAGCTGTATG |
| | TACTATGGTTTGTTGTACTGGATTAACAGGTTCTGTAAGTGCACATTAGGTGTTTATGATTTCTGTG |
| | TTAGTCCAGCCGAATTTAAGTATATGGTTGCTAATGGTTTGAATGCACCAAATGGCCCTTTTGATGC |
| | ACTCTTTCTGTCTTTTAAACTAATGGGTATTGGTGGTCCTAGAACCATTAAAGTCTCTACTGTACAG |
| | TCTAAATTGACTGATCTTAAGTGCACAAACGTCGTTCTAATGGGCATTTTGTCTAACATGAACATAG |
| | CTTCTAATTCAAAGGAGTGGGCATATTGTGTTGAAATGCACAATAAAATAAATTTGTGTGACGACCC |
| | TGAAACTGCTCAAGAGTTATTGCTGGCGTTGTTGGCCTTTTTCTTGTCTAAGCATAGTGATTTTGGT |
| | CTTGGTGATCTTGTCGATTCTTATTTTGAGAACGACTCCATTTTGCAAAGTGTTGCATCTTCTTTTG |
| | TTGGTATGCCATCTTTTGTTGCATATGAAACAGCAAGACAAGAGTATGAAAATGCTGTTGCAAATGG |
| | TTCCTCACCACAAATAATCAAACAATTGAAGAAGGCTATGAATGTTGCAAAAGCTGAGTTTGACAGG |
| | GAGTCATCTGTTCAAAAGAAAATTAACAGAATGGCTGAACAAGCTGCTGCAGCTATGTACAAAGAAG |
| | CACGTGCTGTTAATAGAAAATCAAAAGTTGTAAGTGCAATGCATAGTTTACTCTTTGGCATGCTCCG |
| | ACGTTTGGACATGTCTAGTGTTGACAATATCCTTAATATGGCACGTAATGGTGTTGTCCCTCTTTCC |
| | GTTATCCCTGCTACTTCTGCAGCCAGGCTCGTCGTCGTAGTGCCAGATCATGATTCATTTGTGAAAA |
| | TGATGGTAGATGGTTTTGTGCACTACGCTGGTGTTGTTTGGATATTACAGGAAGTTAAGGATAATGA |
| | CGGTAAGAATGTGCATCTTAAAGATGTTACAAAGGAAAACCAGGAAATACTTGTTTGGCCTCTGATT |
| | TTGACTTGTGAACGTGTCGTTAAATTGCAGAACAATGAAATAATGCCAGGCAAGATGAAGGTCAAGG |
| | CCACCAAAGGTGAAGGTGATGGAGGCATTATTAGTGAAGGTAATGCTCTATACAACAATGAAGGTGG |
| | ACGTGCATTTATGTATGCATATGTGACTACGAAGCCTGGCATGAAGTATGTTAAATGGGAACATGAC |
| | TCTGGTGTGGTTACAGTTGAATTGGAACCACCTTGCAGATTTGTTATAGACACACCTACTGGACCCC |
| | AAATTAAGTATCTTTATTTTGTTAAGAATCTTAACAATTTAAGGAGAGGTGCTGTTTTGGGTTACAT |
| | TGGTGCCACTGTGAGATTGCAAGCTGGCAAACAGACTGAGTTTGTTTCAAACTCCCATTTATTAACA |
| | CATTGTGCTTTTGCTGTTGACCCAGCTGCAGCCTACCTTGATGCTGTTAAACAAGGCGCAAAACCTG |
| | TTGGCAATTGTGTAAAGATGTTGACTAATGGTTCTGGTAGTGGTCAGGCTATTACTAGTACCATTGA |
| | TTCTAACACCACGCAGGACACATATGGTGGCGCGTCTGTTTGTATTTATTGCAGAGCACATGTTGCA |
| | CATCCAACCATGGACGGTTTTTGTCAGTATAAAGGTAAGTGGGTACAAGTGCCTATAGGTACAAATG |
| | ACCCTATAAGATTTTGTCTTGAAAATACTGTTTGTAAAGTTTGTGGTTGTTGGCTTAATCATGGCTG |
| | TACATGTGACCGGACTGCTATCCAAAGTTTTGATAGCAGTTATTTAAACGAGTCAGGGGCTCTAGTG |
| | CCGCTCGACTAGAGCCCTGTAATGGTACAGACATAGATTACTGTGTCCGTGCATTTGACGTTTACAA |
| | TAAAGATGCGTCTTTTATCGGAAAAAATCTGAAGTCCAATTGTGTGCGCTTCAAGAATGTAGATAAG |
| | GATGACGCGTTCTATATTGTTAAACGTTGCATTAAGTCAGTTATGGACCACGAGCAGTCCATGTATA |
| | ACTTACTTAAAGGCTGTAATGCTGTTGCTAAGCATGATTTCTTTACTTGGCATGAGGGCAGAACCAT |
| | TTATGGTAATGTTAGTAGACAGGATCTTACTAAATACACCATGATGGATTTGTGCTTCGCTCTGCGT |
| | AACTTTGATGAAAAAGATTGTGGAGTTTTTAAGGAGATATTGGTTCTTACTGGTTGTTGTAATACTG |
| | ATTACTTTGAAATGAAGAATTGGTTTGACCCCATAGAAAATGAGGATATACACCGTGTGTATGCTGC |
| | TTTAGGCAAGGTAGTCGCAAATGCAATGCTTAAGTGTGTTGCTTTTTGCGACGAAATGGTGCTCAAA |
| | GGAGTTGTTGGTGTTTTGACCTTAGACAACCAAGATCTTAATGGGAATTTCTATGACTTCGGTGATT |
| | TTGTATTGTGTCCTCCTGGAATGGGAATACCCTACTGCACGTCATACTATGCTTATATGATGCCTGT |
| | TATGGGTATGACTAATTGTTTAGCTAGTGAGTGCTTTATGAAAAGTGACATCTTTGGTCAAGACTTC |
| | AAAACTTTTGATTTGTTGAAATATGATTTCACAGAACATAAGGAGGTTTTGTTTAACAAGTACTTTA |
| | AGTATTGGGGACAGGATTATCATCCTGATTGTGTTGATTGCCATGACGAGATGTGTATTTTGCATTG |
| | TTCAAATTTTAACACACTCTTCGCAACCACAATTCCAAACACAGCTTTTGGACCTCTGTGCAGAAAA |
| | GTGTTTATTGATGGTGTACCCGTAGTTGCTACTGCTGGTTACCACTTTAAACAATTAGGACTTGTGT |
| | GGAACAAAGATGTTAACACCCATTCTACCAGACTTACTATTACTGAACTCTTACAGTTTGTGACAGA |
| | TCCAACGCTTATAGTTGCGTCATCGCCTGCCTTGGTGGACAAACGCACTGTTTGTTTTTCTGTCGCT |
| | GCTTTGAGTACAGGATTAACATCCCAAACAGTAAAACCTGGCCATTTTAATAAGGAGTTTTATGACT |
| | TCTTACGTTCTCAAGGGTTTTTCGATGAGGGTTCAGAATTAACATTGAAGCATTTCTTTTTTACACA |
| | AAAGGGTGATGCTGCAATTAAAGATTTTGATTATTATCGTTACAACAGACCTACCATTCTGGATATT |
| | GGACAAGCTCGCGTAGCATATCAAGTGGCAGCTCGCTATTTTGACTGTTACGAGGGTGGCTGTATTA |
| | CATCTAGAGAGGTTGTTGTTACAAACCTTAATAAAAGCGCTGGTTGGCCCCTTAATAAGTTTGGTAA |
| | AGCTGGTTTATATTATGAGTCTATTAGTTATGAGGAACAAGATGCTATTTTTTTATTAACAAAGCGT |
| | AATATTCTCCCTACTATGACTCAGTTAAATCTTAAATATGCCATATCTGGTAAGGAACGTGCACGTA |
| | CAGTGGGTGGCGTCTCTTTATTAGCTACTATGACTACACGACAGTTTCATCAGAAATGTCTAAAATC |
| | CATAGTAGCTACCAGAAATGCCACTGTTGTTATCGGCACTACCAAGTTTTATGGCGGTTGGGATAAT |
| | ATGTTAAAGAACCTGATGGCCGATGTTGACGATCCTAAATTGATGGGATGGGACTATCCTAAGTGCG |
| | ATAGAGCTATGCCCTCAATGATTCGTATGTTGTCGGCTATGATTTTAGGTTCTAAGCATGTCACATG |
| | TTGTACGGCTAGTGATAAATTTTATAGACTTAGTAATGAGCTTGCTCAAGTTTTGACCGAGGTTGTT |
| | TATTCAAATGGTGGGTTTTATTTTAAACCTGGTGGTACAACTTCTGGTGATGCAACTACAGCCTACG |
| | CCAATTCTGTCTTTAATATATTTCAGGCTGTAAGTTCTAACATTAATTGCGTTTTGAGCGTTAACTC |
| | GTCAAATTGCAATAATTTTAATGTTAAGAAGTTACAGAGACAACTCTATGATAATTGCTATAGAAAT |
| | AGTAATGTTGATGAATCTTTTGTGGATGACTTTTATGGTTATTTGCAAAAGCATTTTTCTATGATGA |
| | TTCTTTCTGATGATGGTGTTGTGTGCTACAATAAAACTTATGCTGAACTTGGTTACATTGCTGATAT |
| | TAGTGCTTTTAAAGCCACTTTGTATTATCAGAATGGTGTGTTTATGAGTACAGCTAAGTGTTGGACT |
| | GAGGAAGATCTTTCTATAGGACCTCATGAATTTTGCTCACAGCACACTATGCAGATTGTAGATGAAA |
| | ATGGTAAGTATTATCTACCATATCCAGATCCTAGCCGTATTATTTCTGCTGGTGTTTTTGTGGATGA |
| | CGTCACTAAGACTGATGCTGTCATTCTTTTGGAACGCTATGTTTCTCTGGCTATAGATGCATACCCA |
| | TTGTCTAAGCATCCTAAACCTGAGTACAGGAAGGTGTTTTACGCATTGTTAGATTGGGTTAAACATC |
| | TCAACAAGACTCTTAACGAAGGTGTTTTGGAGTCTTTTTCTGTTACACTTTTAGATGAACATGAGTC |
| | TAAGTTTTGGGATGAAAGCTTTTATGCTAGTATGTATGAGAAGTCTACAGTATTACAAGCTGCTGGT |
| | CTTTGTGTAGTATGTGGCTCTCAAACAGTTCTAAGATGCGGTGATTGTTTACGCAGACCTATGTTGT |
| | GCACTAAGTGCGCCTATGATCATGTGTTTGGCACTGATCATAAGTTCATTTTAGCTATTACACCATA |
| | TGTTTGTAACACATCTGGCTGCAACGTAACTGACGTTACAAAACTGTATCTTGGAGGTTTGAATTAT |
| | TACTGTGTAGACCACAAACCACATCTTTCATTCCCACTGTGTTCAGCTGGTAATGTCTTTGGTTTGT |
| | ACAAAAGTTCTGCTTTGGGTTCCATGGACATTGATGTCTTTAACAAACTTTCTACCTCTGATTGGTC |
| | TGACATTCGCGACTACAAGCTGGCTAATGATGCAAAAGAGTCACTAAGGTTGTTTGCAGCTGAAACG |
| | GTCAAGGCTAAAGAGGAAAGTGTTAAGTCATCATACGCTTATGCTACCCTAAAGGAGATTGTAGGTC |
| | CTAAGGAACTTTTGCTTTTATGGGAAAGTGGAAAAGCCAAACCACCGTTAAACCGTAATTCTGTTTT |
| | TAGATGOTTCCAAATTACAAAAGACTCCAAGTTTCAAGTTGGTGAGTTTGTGTTTGAGAAAGTAGAT |
| | TATGGTTCTGATACGGTTACTTACAAATCCACTGCTACTACTAAGTTAGTACCAGGTATGTTATTTA |
| | TTTTGACTTCTCATAATGTTGCTCCACTTAGAGCGCCAACAATGGCAAACCAGGAGAAATATTCTAC |
| | CATTTACAAGTTGCACCCATCATTTAATGTTAGTGATGCTTATGCAAATCTTGTACCTTATTACCAA |
| | CTTATTGGCAAACAGCGTATCACCACAATACAGGGTCCTCCTGGTAGTGGAAAATCGCATTGCTCTA |
| | TTGGTATTGGTGTGTATTACCCTGGAGCGAGGATCGTGTTCACTGCTTGTTCTCACGCTGCTGTTGA |
| | TTCGCTTTGTGCAAAAGCTGTCACAGCCTATAGTGTTGATAAGTGTACACGTATTATTCCTGCACGT |
| | GCCAGAGTTGAGTGTTATAGTGGTTTTAAACCTAATAACACTAGTGCACAATACGTGTTTAGTACTG |
| | TTAATGCGTTACCTGAAGTTAATGCAGACATTGTTGTCGTGGATGAGGTGTCTATGTGCACTAACTA |
| | TGACTTGTCTGTGATTAACCAGCGTATATCATATAAACACATTGTATATGTTGGTGATCCTCAACAG |
| | CTTCCAGCTCCTAGAGTTCTTATCTCTAAAGGTGTTATGGAACCAATTGACTATAATGTTGTGACAC |
| | AACGTATGTGTGCTATAGGACCCGATGTCTTTTTACACAAGTGTTACAGATGTCCTGCTGAAATAGT |
| | TAACACTGTTTCAGAGCTTGTTTATGAAAACAAGTTTGTACCTGTCAAAGAAGCTAGTAAGCAGTGC |
| | TTCAAAATCTTTGAACGCGGTAGTGTTCAGGTAGACAATGGCTCCAGTATAAATAGGCGTCAACTTG |
| | ATGTTGTTAAGCGATTTATACATAAAAACTCCACATGGAGCAAGGCTGTGTTTATTTCACCTTACAA |
| | TAGTCAAAATTATGTAGCTGCCAGGCTTTTAGGTTTACAAACTCAGACAGTGGATTCTGCTCAAGGT |
| | AGTGAATATGACTATGTTATATTCGCACAGACATCAGATACTGCTCATGCCTGTAATGCCAATCGTT |
| | TTAACGTTGCCATTACTAGAGCAAAGAAAGGTATTTTCTGTATTATGTCTGACAGAACTTTGTTTGA |
| | TGCACTTAAGTTCTTTGAAGTTACTATGACAGATTTACAGTCTGAAAGCAGTTGTGGTTTGTTTAAG |
| | GATTGTGCACGTAACCCTATTGATTTACCACCAAGTCATGCCACTACTTATTTGTCATTGTCTGATA |
| | GATTTAAGACTAGTGGTGACTTGGCTGTTCAAATAGGTAACAACAATGTTTGTACCTATGAACATGT |
| | GATTTCATATATGGGTTTCAGGTTTGATGTTAGCATGCCTGGTAGTCATAGTTTGTTCTGTACTAGA |
| | GACTTTGCCATGCGTCATGTCAGAGGTTGGTTAGGAATGGATGTGGAAGGTGCACATGTCACAGGTG |
| | ACAATGTTGGCACTAATGTACCTCTACAAGTTGGTTTTTCCAATGGTGTTGATTTTGTAGCTCAACC |
| | TGAAGGTTGTGTTTTAACAAACACTGGCAGTGTTGTAAAACCTGTTCGTGCTCGTGCACCTCCTGGA |
| | GAACAATTTACTCACATTGTACCTCTGTTACGCAAGGGACAACCTTGGAGTGTGTTGAGAAAACGTA |
| | TTGTTCAAATGATAGCAGATTTTCTTGCTGGCTCATCTGATGTATTGGTGTTTGTGCTTTGGGCTGG |
| | CGGTTTAGAGTTGACCACTATGCGTTATTTTGTTAAGATTGGAGCTGTTAAACATTGCCAATGTGGT |
| | ACTGTTGCAACATGCTACAATTCTGTTAGTAATGACTATTGTTGCTTTAAACATGCATTGGGCTGTG |
| | ACTATGTTTATAACCCATATGTCATAGATATTCAACAATGGGGTTATGTTGGTTCACTCTCCAATAA |
| | TCACCATGCAATTTGTAATGTTCATAGAAATGAACACGTTGCTTCTGGTGATGCTATTATGACTAGA |
| | TGTTTGGCTGTGTATGATTGCTTTGTTAAGAATGTGGATTGGTCAATTACCTACCCTACGATAGCTA |
| | ATGAAAATGCCATAAACAAGGGCGGTCGCACTGTGCAGAGTCATATTATGCGTGCTGCTATTAAATT |
| | GTACAACCCTAAAGCAATCCATGACATTGGTAATCCTAAGGGTATTCGTTGTGCTGTAACTGATGCC |
| | AAGTGGTATTGTTATGACAAGAACCCTATTAATTCTAATGTGAAAACATTGGAGTATGATTACATGA |
| | CACATGGCCAAATGGAAGGCTTGTGTTTATTTTGGAATTGTAATGTGGATATGTACCCTGAATTCTC |
| | AATTGTTTGCAGGTTTGACACACGTACACGATCTACATTGAACCTCGAAGGTGTAAATGGTGGTTCA |
| | TTGTATGTCAATAACCATGCGTTTCACACTCCTGCTTATGATAAACGTGCTATGGCTAAATTGAAAC |
| | CAGCACCGTTTTTCTACTATGACGACGGTTCATGTGAGGTTGTTCACGATCAAGTTAACTATGTTCC |
| | TTTGAGAGCCACTAATTGCATTACCAAGTGTAATATTGGTGGTGCTGTATGTTCTAAGCACGCTAAT |
| | CTCTATAGAGCATATGTTGAGTCATATAATATTTTTACTCAAGCTGGTTTTAATATTTGGGTTCCTA |
| | CCACGTTTGATTGTTATAATTTGTGGCAGACATTCACAGATGTCAATTTACAAGGTTTAGAGAACAT |
| | TGCTTTTAACGTTGTTAATAAAGGTTCATTTGTTGGTGCTGACGGTGAATTACCAGTAGCCATTAGT |
| | GGTGATAAAGTGTTCGTACGTGATGGTAACACTGATAATTTAGTCTTTGTTAACAAAACATCACTGC |
| | CTACAAATATAGCATTTGAACTTTTTGCTAAGAGGAAGGTTGGTTTAACACCACCTCTCAGTATTCT |
| | CAAAAACCTTGGTGTTGTCGCCACATATAAGTTTGTCTTGTGGGATTATGAAGCTGAGCGTCCCTTG |
| | ACAAGCTTTACTAAGTCTGTTTGTGGTTATACAGACTTTGCAGAAGATGTTTGTACTTGTTACGATA |
| | ATAGTATACAAGGTTCATACGAACGTTTTACTCTCTCAACTAATGCTGTGTTATTCTCTGCTACTGC |
| | TGTGAAAACAGGTGGTAAGAGTTTGCCGGCTATTAAACTGAATTTTGGAATGCTTAACGGTAATGCA |
| | ATTGCTACTGTCAAATCAGAAGATGGTAACATAAAAAATATTAACTGGTTTGTTTACGTACGCAAAG |
| | ATGGTAAACATGTTGATCATTATGATGGTTTTTATACCCAAGGTCGTAATTTACAAGACTTTTTGCC |
| | TCGCAGCACAATGGAAGAAGACTTTTTGAACATGGATATAGGCGTGTTTATTCAAAAGTATGGTCTA |
| | GAGGATTTCAACTTCGAGCACGTTGTGTATGGCGATGTTTCAAAAACTACTCTAGGCGGTTTACACT |
| | TGTTGATTTCACAAGTACGTCTGAGTAAAATGGGCATCTTAAAGGCAGAGGAGTTTGTGGCAGCATC |
| | TGACATAACACTCAAATGTTGTACTGTGACTTATCTTAATGATCCTAGTTCTAAGACTGTTTGTACT |
| | TACATGGATTTGTTGTTGGATGATTTTGTTTCTTTATTGAAGTCTTTGGATTTGACTGTTGTATCCA |
| | AGGTTCATGAGGTCATAATTGACAACAAACCATGGAGATGGATGCTATGGTGTAAAGATAATGCCGT |
| | TGCTACATTCTATCCTCAGTTGCAGAGTGCAGAATGGAAATGCGGGTATTCTATGCCTGGTATTTAT |
| | AAGACACAACGTATGTGCTTAGAACCATGTAATTTGTATAATTATGGTGCAGGTTTGAAGTTGCCCA |
| | GTGGCATTATGTTCAATGTTGTTAAATACACTCAATTGTGTCAATATTTTAACAGTACCACGTTATG |
| | TGTTCCTCATAATATGAGAGTGTTACACTTGGGTGCTGGCTCTGATTATGGTGTTGCACCAGGAACT |
| | GCTGTTCTTAAAAGGTGGTTGCCGCACGACGCAATTGTTGTTGACAATGATGTTGTTGACTATGTGA |
| | GTGATGCTGATTTTAGTGTTACTGGTGATTGTGCAACCGTTTATTTGGAAGACAAGTTTGACTTGTT |
| | AATTTCTGATATGTACGATGGTAGGACAAAGGCAATTGATGGTGAAAATGTTTCAAAAGAAGGATTT |
| | TTCACTTACATCAATGGTTTCATTTGTGAAAAACTTGCCATCGGAGGTTCAATTGCTATTAAAGTAA |
| | CAGAGTATAGCTGGAATAAGAAATTGTATGAACTTGTACAAAGATTTTCTTTTTGGACTATGTTTTG |
| | CACTTCTGTTAATACGTCATCATCAGAAGCCTTTGTTGTCGGAATTAACTATCTTGGTGATTTCGCA |
| | CAAGGACCTTTTATAGATGGTAACATAATACATGCAAATTATGTATTTTGGCGTAACTCCACTGTTA |
| | TGAGTTTGTCCTACAACTCTGTTTTAGACCTGAGTAAATTTAATTGCAAACACAAAGCTACTGTTGT |
| | TGTGCAATTAAAGGATAGTGATATTAATGACATGGTGCTTAGTCTTGTTAGGAGTGGTAAGTTGCTT |
| | GTAAGGGGTAATGGCAAGTGTTTGAGTTTTAGTAATCATTTAGTCTCAACTAAATAAAATGTTTGTT |
| | TTACTTGTTGCATATGCCTTGTTGCATATTGCTGGTTGTCAAACTACAAATGGGACGAACACTAGTC |
| | ACTCTGTTTGCAACGGCTGTGTTGGTCATTCGGAAAATGTATTTGCTGTTGAGAGTGGTGGTTATAT |
| | ACCCTCCAACTTTGCATTTAATAATTGGTTCCTCTTAACTAATACCTCATCTGTTGTAGATGGTGTT |
| | GTGAGGAGTTTTCAGCCTTTGTTGCTTAATTGCTTATGGTCTGTTTCTGGCTCGCAGGTTATTACTG |
| | GTTTTGTCTATTTTAATGGTACTGGGAGAGGTGCTTGTAAAGGTTTTTATTCAAATGCTTCGTCTGA |
| | TGTCATACGTTACAACATCAATTTTGAAGAAAACCTTAGACGTGGAACCATTTTGTTTAAAACATCT |
| | TATGGTGCTGTTGTGTTTTATTGTACCAACAACACTTTGGTTTCAGGTGATGCGCACATACCATCTG |
| | GTACAGTTTTGGGCAATTTTTATTGCTTTGTAAATACTACTATTGGCAATGAAACTACGTCTGCTTT |
| | TGTGGGTGCACTACCTAAGACAGTTCGTGAGTTTGTTATTTCACGCACAGGACATTTTTATATTAAT |
| | GGCTATCGCTATTTCTCTTTAGGTAATGTAGAAGCCGTTAATTTCAATGTCACTAATGCTGCAACCA |
| | CTGTTTGTACTGTTGCGTTAGCTTCTTATGCTGACGTTTTGGTTAATGTTTCACAAACTGCTATTGC |
| | TAATATAATTTATTGCAATTCTGTTATTAACAGACTGAGATGTGACCAGCTGTCCTTTGATGTACCA |
| | GATGGTTTTTATTCCACAAGCCCTACTCAACCCGTTGAGCTACCTGTGTCTATTGTGTCGCTACCTG |
| | TTTATCACAAACACACGTTTATTGTGTTGTATGTTAACTTTGAACATCAGCGTGGCCCTGGCAAGTG |
| | CTATAACTGTCGTCCTGCTGTTATTAATATTACACTGGCCAATTTTAATGAAACTAAAGGGCCCTTG |
| | TGTGTTGACACATCACACTTCACTACCCAATTCGTCGACAATGTCAAGCTTGCTAGGTGGAGTGCTA |
| | GTATTGACACGGGAAATTGCCCTTTTTCTTTTGGCAAAGTTATTAACTTTGTTAAATTTGGCAGTGT |
| | ATGTTTTTCGCTAAAGTATATACCCGGTGGTTGCGCAATGCCTATAATGGCTAATTTGGTTAATTAT |
| | AAATCTCATAATATAGGCTCATTGTATGTTTCTTGGAGTGATGGTGATGTAATTACTGGCGTCCCGA |
| | AACCTGTTGAGGGTGTTAGTTCCTTTATGAATGTTACATTGAATAAATGTACTAAATATAACATTTA |
| | TGATGTATCTGGTGTGGGTGTTATTCGCATTAGCAATGACACCTTTCTTAATGGAATTACGTACACA |
| | TCAACTTCAGGTAACCTTCTGGGTTTTAAAGATGTTACTAATGGCACCATCTACTCTATCACTCCCT |
| | GTAACCCACCAGATCAGCTTGTTGTTTATCAGCAAGCTGTTGTTGGTGCTATGTTGTCTGAAAACTT |
| | TACTAGTTACGGCTTTTCTAATGTTGTAGAAATGCCGAAATTTTTCTATGCGTCCAATGGCACTTAT |
| | AATTGCACAGACGCTGTTTTAACTTATTCTAGTTTTGGCGTTTGTGCAGATGGTTCTATAATTGCTG |
| | TTCAACCACGTAATGTTTCATATGATAGTGTTTCAGCTATTGTCACAGCTAATTTGTCTATACCCTC |
| | CAATTGGACCACTTCGGTCCAGGTTGAGTATTTACAAATTACAAGTACACCTATCGTAGTTGATTGC |
| | TCCACTTATGTTTGCAATGGTAATGTGCGCTGTGTTGAATTGCTTAAGCAGTACACTTCTGCTTGTA |
| | AAACTATTGAAGACGCCTTAAGAAATAGCGCCATGCTGGAGTCTGCAGATGTTAGTGAGATGCTCAC |
| | TTTTGACAAGAAAGCGTTTACACTTGCTAATGTTAGTAGTTTTGGTGACTACAACCTTAGCAGTGTT |
| | ATACCTAGCTTGCCCAGAAGTGGTAGTAGAGTGGCTGGTCGCAGTGCCATAGAAGACATACTTTTTA |
| | GCAAACTTGTTACGTCTGGACTTGGCACTGTAGACGCAGACTACAAAAAGTGTACTAAGGGTCTTTC |
| | CATTGCTGACTTGGCTTGTGCCCAATATTATAATGGCATTATGGTTTTGCCTGGCGCCGCTGATGCT |
| | GAACGTATGGCCATGTATACAGGTTCTTTAATTGGTGGAATTGCTTTAGGAGGTCTTACATCAGCCG |
| | CTTCAATACCATTTTCATTAGCAATTCAGTCACGTTTAAATTATGTTGCATTGCAGACTGATGTTTT |
| | ACAAGAAAATCAGAGAATTCTTGCTGCATCTTTTAATAAAGCAATGACCAACATAGTAGATGCCTTT |
| | ACTGGTGTTAATGATGCTATTACACAAACTTCACAAGCTCTACAAACAGTTGCTACTGCACTTAATA |
| | AGATCCAGGATGTTGTTAATCAACAAGGCAACTCATTGAACCATTTAACTTCTCAGTTGAGGCAGAA |
| | TTTTCAAGCCATTTCTAGCTCTATTCAGGCTATCTATGACAGACTTGATATTATTCAGGCTGATCAA |
| | CAAGTAGATAGGCTGATTACTGGTAGACTGGCTGCTCTGAATGTATTCGTTTCTCATACATTGACTA |
| | AGTACACTGAAGTTCGTGCTTCCAGACAGCTTGCACAACAAAAAGTGAATGAGTGTGTCAAATCCCA |
| | GTCTAAGCGGTATGGCTTCTGTGGAAATGGCACGCACATTTTCTCACTTGTTAATGCTGCTCCTGAG |
| | GGGCTTGTTTTTCTCCATACTGTCTTGCTGCCGACACAATATAAGGATGTTGAAGCGTGGTCTGGGT |
| | TGTGCGTTGATGGTATAAACGGTTATGTGTTGAGACAACCTAATCTTGCTCTTTACAAAGAAGGCAA |
| | TTATTATAGAATTAGATCTCGCATAATGTTTGAACCACGTATTCCTACCATAGCAGATTTTGTCCAA |
| | ATTGAAAATTGCAATGTCACATTTGTTAACATTTCTCGCTCTGAGTTGCAAACTATTGTGCCAGAGT |
| | ATATTGATGTTAATAAGACGCTGCAAGAATTAAGTTACAAATTGCCAAATTACACTGTTCCAGACCT |
| | AGTTGTTGAACAGTACAACCAGACTATTTTGAATTTGACCAGTGAAATTAGCACCCTTGAAAATAAA |
| | TCTGCGGAGCTTAATTACACTGTTCAAAAACTGCAAACTTTGATCGACAACATAAATAGCACATTAG |
| | TTGACTTAAAGTGGCTCAACCGTGTTGAGACTTATATCAAGTGGCCTTGGTGGGTGTGGTTGTGCAT |
| | TTCAGTCGTGCTCATCTTTGTGGTGAGTATGTTGCTATTATGTTGTTGTTCTACTGGTTGCTGCGGC |
| | TTCTTTAGTTGTTTTGCATCTTCTATTAGAGGTTGTTGTGAATCAACTAAACTTCCTTATTACGACG |
| | TTGAAAAGATCCACATACAGTAATGGCTCTAGGTTTGTTCACATTGCAATTTGTGTCTGCTGTTAAT |
| | CAATCTCTTACCAAGTCGAAAGTTAGTGCTGAAGTTTCACGACAGGTTATCCAAGACGTGAAAGATG |
| | GCACTGTTACCTTCAACTTGCTAGCGTATACACTAATGAGCCTCTTTGTTGTGTATTTTGCTTTATT |
| | TAAAGCAAGATCACACCGTGGTAGATCTGCTCTTATAGTGTTTAAAATTTTAATCCTTTTCGTTTAT |
| | GTGCCATTGCTGTATTGGTCTCAAGCATATATTGACGCAACGTTGATTGCTGTAATTTTGCTTGGAA |
| | GATTTTTCCATACAGCTTGGCACTGCTGGCTCTACAAGACATGGGATTTCATTGTCTTCAATGCAAC |
| | CACACTTTGCTATGTGCAAGGTAAGTGTTGGTTTCTTGAAAATAAGGCTCTGAAACCATTCGTCTGT |
| | TTTTACGGAGGGGACCAATTCCTTTACATAGGTGACAGAATTGTTACTTATCTCTCAACTAACGATT |
| | TGTACGTTGCTCTTAGAGGACGTATTGATAAAGACCTCAGCCTTTCTAGAAAGGTTGAGTTATATAA |
| | CGGTGAATGTGTATACTTGTTTTGTGAACACCCAGCTGTTGGAATAGTCAATACAGATTTCAAATTA |
| | GAAATCCACTAAGATGTTCCTTAAGCTAGTGGATGATCATGCTTTGATTGTTAATGTACTACTCTGG |
| | TGTGTGGTGCTTATAGTGATACTACTAGTGTGTATTACAATAATTAAACTAATTAAGCTTTGTTTCA |
| | CTTGCCATATGTTTTGTAATAGAACAGTTTATGGCCCCATTAAAAATGTGTACCATATTTACCAATC |
| | ATATATGCACATAGACCCTTTCCCTAAACGAGTTATTGATTTCTAAACTAAACGACAATGTCAAACG |
| | ACAATTGTACGGGTGACATTGTCACCCATTTGAAGAATTGGAATTTTGGTTGGAATGTTATTCTAAC |
| | CATATTCATTGTTATTCTTCAGTTTGGACACTATAAATACTCCAGATTGTTTTATGGTTTGAAGATG |
| | CTTGTACTGTGGCTTCTTTGGCCACTTGTACTTGCTTTGTCAATCTTTGACACCTGGGCTAATTGGG |
| | ACTCTAATTGGGCCTTTGTTGCATTTAGCTTCCTTATGGCCGTATCAACACTCGTTATGTGGGTGAT |
| | GTACTTTGCAAATAGTTTCAGACTTTTCCGACGTGCTCGAACTTTTTGGGCATGGAATCCTGAGGTT |
| | AATGCAATCACTGTCACAACCGTGTTGGGACAGACATACTATCAACCCATTCAACAAGCTCCAACAG |
| | GCATTACTGTGACCTTGTTGAGCGGCGTGCTTTACGTTGACGGACATAGATTGGCTTCAGGTGTTCA |
| | GGTTCATAACCTACCTGAATACATGACAGTTGCCGTGCCTAGTACTACTATAATTTATAGTAGAGTC |
| | GGAAGGTCCGTAAATTCTCAAAATAGCACAGGCTGGGTTTTCTACGTACGAGTAAAACACGGTGATT |
| | TTTCTGCAGTGAGCTCCCCCATGAGCAACATGACAGAAAACGAAAGATTGCTTCATTTTTTCTAAAC |
| | TGAACGAAAAGATGGCTACAGTCAAATGGGCTGATGCATCTGAACCACAACGTGGTCGTCAGGGTAG |
| | AATACCTTATTCTCTTTATAGCCCTTTGCTTGTTGATAGTGAACAACCTTGGAAGGTGATACCTCGT |
| | AATTTGGTACCCGTCAACAAGAAAGACAAAAATAAGCTTATAGGCTATTGGAATGTTCAAAAACGTT |
| | TCAGAACTAGAAAGGGCAAACGGGTGGATTTGTCACCCAAGTTACATTTTTATTATCTTGGCACAGG |
| | ACCTCATAAAGATGCAAAATTTAGAGAGCGTGTTGAAGGTGTTGTCTGGGTTGCTGTTGATGGTGCT |
| | AAAACTGAACCTACAGGTTACGGTGTTAGGCGCAAGAATTCAGAACCAGAGATACCACACTTCAATC |
| | AAAAGCTCCCAAATGGTGTTACTGTTGCTGAAGAACCTGACTCCCGTGCTCCTTCCCGTTCTCAGTC |
| | AAGGTCTCAGAGTCGTATTCAATCTCGGAATCCTTCAAGTGACAGAAACCATAACAGTCAGGATGAC |
| | ATCATGAAGGCAGTCGCTGCGGCTCTTAAATCTTTAGGTTTTGACAAGCCTCAGGAAAAAGACAAAA |
| | AGTCAGCGAAAACGGGTACCCCTAAGCCTTCTCGTAATCAGAGTCCTGCTTCTTCTCAATCTGCTGC |
| | CAAGATTCTTGCTCGTTCTCAGAGTTCTGAAACAAAAGAACAAAAGCATGAAATGCAAAAGCCACGG |
| | TGGAAAAGACAGCCTAACGATGATGTGACATCTAATGTCACACAATGTTTTGGCCCCAGAGACCTTG |
| | ACCACAACTTTGGAAGTGCAGGTGTTGTGGCCAATGGTGTTAAAGCTAAAGGCTACCCACAATTTGC |
| | TGAGCTTGTGCCGTCTACAGCTGCTATGCTTTTTGATAGTCACATTGTTTCCAAAGAGTCAGGCAAC |
| | ACTGTGGTCTTGACTTTCACCACTAGAGTGACTGTGCCCAAAGACCATCCACACTTGGGTAAGTTTC |
| | TTGAGGAATTAAATGCATTCACTAGAGAAATGCAACAACAGCCTCTTCTTAACCCTAGTGCACTAGA |
| | ATTCAACCCATCCCAAACTTCACCTGCAACTGTTGAACCAGTGCGTGATGAAGTTTCTATTGAAACT |
| | GACATAATTGATGAAGTCAACTAAACATGCTACTGTGTTGAAATTCAGGCTTTAGTTGGAATTTTGC |
| | TTTTGCTCTTGTTTTTATTATCTTTCTTTTATGAATATATTTCTTTCCTCTGATCTACGTAATGGTA |
| | CGATCAGAGCTGCTTTTAATTAACATGATCCCTTGCTTTGGCTTGACAAGGATCTAGTCTTATACAC |
| | AATGGTAAGCCTGTGGTAGTAAAGGTATAAGAAATTTGCTACTATGTTACTGAACCTAGGTGAACGC |
| | TAGTATAACTCATTACAATTGTGCTGGAGTAATCAAAGATCGCATTGACGAGCCAACAATGGAAGAG |
| | CCAGTCATTTGTCTTGAGACCTATCTAGTTAGTAACTGCTAATGGAACGGTTTCGATATGGATACAC |
| | AAAAAAA |
| 296 | GenBank Accession No. KX262887 (Zika virus isolate 103451, complete genome) |
| | GTTGTTGATCTGTGTGAATCAGACTGCGACAGTTCGAGTTTGAAGCGAAAGCTAGCAACAGTATCAA |
| | CAGGTTTTATTTTGGATTTGGAAACGAGAGTTTCTGGTCATGAAAAACCCAAAAAAGAAATCCGGAG |
| | GATTCCGGATTGTCAATATGCTAAAACGCGGAGTAGCCCGTGTGAGCCCCTTTGGGGGCTTGAAGAG |
| | GCTGCCAGCCGGACTTCTGCTGGGTCATGGGCCCATCAGGATGGTCTTGGCGATTCTAGCCTTTTTG |
| | AGATTCACGGCAATCAAGCCATCACTGGGTCTCATCAATAGATGGGGTTCAGTGGGGAAAAAAGAGG |
| | CTATGGAAATAATAAAGAAGTTCAAGAAAGATCTGGCTGCCATGCTGAGAATAATCAATGCTAGGAA |
| | GGAGAAGAAGAGACGAGGCGCAGATACTAGTGTCGGAATTGTTGGCCTCCTGCTGACCACAGCTATG |
| | GCAGCGGAGGTCACTAGACGTGGGAGTGCATACTATATGTACTTGGACAGAAACGATGCTGGGGAGG |
| | CCATATCTTTTCCAACCACATTGGGGATGAATAAGTGTTATATACAGATCATGGATCTTGGACACAT |
| | GTGTGATGCCACCATGAGCTATGAATGCCCTATGCTGGATGAGGGGGTGGAACCAGATGACGTCGAT |
| | TGTTGGTGCAACACGACGTCAACTTGGGTTGTGTACGGAACCTGCCATCACAAAAAAGGTGAAGCAC |
| | GGAGATCTAGAAGAGCTGTGACGCTCCCCTCCCATTCCACTAGGAAGCTGCAAACGCGGTCGCAAAC |
| | CTGGTTGGAATCAAGAGAATACACAAAGCACTTGATTAGAGTCGAAAATTGGATATTCAGGAACCCT |
| | GGCTTCGCGTTAGCAGCAGCTGCCATCGCTTGGCTTTTGGGAAGCTCAACGAGCCAAAAAGTCATAT |
| | ACTTGGTCATGATACTGCTGATTGCCCCGGCATACAGCATCAGGTGCATAGGAGTCAGCAATAGGGA |
| | CTTTGTGGAAGGTATGTCAGGTGGGACTTGGGTTGATGTTGTCTTGGAACATGGAGGTTGTGTCACC |
| | GTAATGGCACAGGACAAACCGACTGTCGACATAGAGCTGGTTACAACAACAGTCAGCAACATGGCGG |
| | AGGTAAGATCCTACTGCTATGAGGCATCAATATCAGACATGGCTTCGGACAGCCGCTGCCCAACACA |
| | AGGTGAAGCCTACCTTGACAAGCAATCAGACACTCAATATGTCTGCAAAAGAACGTTAGTGGACAGA |
| | GGCTGGGGAAATGGATGTGGACTTTTTGGCAAAGGGAGCCTGGTGACATGCGCTAAGTTTGCATGCT |
| | CCAAGAAAATGACCGGGAAGAGCATCCAGCCAGAGAATCTGGAGTACCGGATAATGCTGTCAGTTCA |
| | TGGCTCCCAGCACAGTGGGATGATCGTTAATGACACAGGACATGAAACTGATGAGAATAGAGCGAAG |
| | GTTGAGATAACGCCCAATTCACCAAGAGCCGAAGCCACCCTGGGGGGTTTTGGAAGCCTAGGACTTG |
| | ATTGTGAACCGAGGACAGGCCTTGACTTTTCAGATTTGTATTACTTGACTATGAATAACAAGCACTG |
| | GTTGGTTCACAAGGAGTGGTTCCACGACATTCCATTACCTTGGCACGCTGGGGCAGACACCGGAACT |
| | CCACACTGGAACAACAAAGAAGCACTGGTAGAGTTCAAGGACGCACATGCCAAAAGGCAAACTGTCG |
| | TGGTTCTAGGGAGTCAAGAAGGAGCAGTTCACACGGCCCTTGCTGGAGCTCTGGAGGCTGAGATGGA |
| | TGGTGCAAAGGGAAGGCTGTCCTCTGGCCACTTGAAATGTCGCCTGAAAATGGATAAACTTAGATTG |
| | AAGGGCGTGTCATACTCCTTGTGTACCGCAGCGTTCACATTCACCAAGATCCCGGCTGAAACACTGC |
| | ACGGGACAGTCACAGTGGAGGTACAGTACGCAGGGACAGATGGACCTTGCAAGGTTCCAGCTCAGAT |
| | GGCGGTGGACATGCAAACTCTGACCCCAGTTGGGAGGTTGATAACCGCTAACCCCGTAATCACTGAA |
| | AGCACTGAGAACTCTAAGATGATGCTGGAACTTGATCCACCATTTGGGGACTCTTACATTGTCATAG |
| | GAGTCGGGGAGAAGAAGATCACCCACCACTGGCACAGGAGTGGCAGCACCATTGGAAAAGCATTTGA |
| | AGCCACTGTGAGAGGTGCCAAGAGAATGGCAGTCTTGGGAGACACAGCCTGGGACTTTGGATCAGTT |
| | GGAGGCGCTCTCAACTCATTGGGCAAGGGCATCCATCAAATTTTTGGAGCAGCTTTCAAATCATTGT |
| | TTGGAGGAATGTCCTGGTTCTCACAAATTCTCATTGGAACGTTGCTGATGTGGTTGGGTCTGAACAC |
| | AAAGAATGGATCTATTTCCCTTATGTGCTTGGCCTTAGGGGGAGTGTTGATCTTCTTATCCACAGCC |
| | GTCTCTGCTGATGTGGGGTGCTCGGTGGACTTCTCAAAGAAGGAGACGAGATGCGGTACAGGGGTGT |
| | TCGTCTATAACGACGTTGAAGCCTGGAGGGACAGGTACAAGTACCATCCTGACTCCCCCCGTAGATT |
| | GGCAGCAGCAGTCAAGCAAGCCTGGGAAGATGGTATCTGCGGGATCTCCTCTGTTTCAAGAATGGAA |
| | AACATCATGTGGAGATCAGTAGAAGGGGAGCTCAACGCAATCCTGGAAGAGAATGGAGTTCAACTGA |
| | CGGTCGTTGTGGGATCTGTAAAAAACCCCATGTGGAGAGCTCCACAGAGATTGCCCGTGCCTGTGAA |
| | CGAGCTGCCCCACGGCTGGAAGGCTTGGGGGAAATCGTACTTCGTCAGAGCAGCAAAGACAAATAAC |
| | AGCTTTGTCGTGGATGGTGACACACTGAAGGAATGCCCACTCAAACATAGAGCATGGAACAGCTTTC |
| | TTGTGGAGGATCATGGGTTCGGGGTATTTCACACTAGTGTCTGGCTCAAGGTTAGAGAAGATTATTC |
| | ATTAGAGTGTGATCCAGCCGTTATTGGAACAGCTGTTAAGGGAAAGGAGGCTGTACACAGTGATCTA |
| | GGCTACTGGATTGAGAGTGAGAAGAATGACACATGGAGGCTGAAGAGGGCCCATCTGATCGAGATGA |
| | AAACATGTGAATGGCCAAAGTCCCACACATTGTGGACAGATGGAATAGAAGAGAGTGATCTGATCAT |
| | ACCCAAGTCTTTAGCTGGGCCACTCAGCCATCACAATACCAGAGAGGGCTACAGGACCCAAATGAAA |
| | GGGCCATGGCACAGTGAAGAGCTTGAAATTCGGTTTGAGGAATGCCCAGGCACTAAGGTCCACGTGG |
| | AGGAAACATGTGGAACAAGAGGACCATCTCTGAGATCAACCACTGCAAGCGGAAGGGTGATCGAGGA |
| | ATGGTGCTGCAGGGAGTGCACAATGCCCCCACTGTCGTTCCGGGCTAAAGATGGCTGTTGGTATGGA |
| | ATGGAGATAAGGCCCAGGAAAGAACCAGAAAGCAACTTAGTAAGGTCAATGGTGACTGCAGGATCAA |
| | CTGATCACATGGATCACTTCTCCCTTGGAGTGCTTGTGATTCTGCTCATGGTGCAGGAAGGGCTAAA |
| | GAAGAGAATGACCACAAAGATCATCATAAGCACATCAATGGCAGTGCTGGTAGCTATGATCCTGGGA |
| | GGATTTTCAATGAGTGACCTGGCTAAGCTTGCAATTTTGATGGGTGCCACCTTCGCGGAAATGAACA |
| | CTGGAGGAGATGTAGCTCATCTGGCGCTGATAGCGGCATTCAAAGTCAGACCAGCGTTGCTGGTATC |
| | TTTCATCTTCAGAGCTAATTGGACACCCCGTGAAAGCATGCTACTGGCCTTGGCCTCGTGTCTTTTG |
| | CAAACTGCGATCTCCGCCTTGGAAGGCGACCTGATGGTTCTCATCAATGGTTTTGCTTTGGCCTGGT |
| | TGGCAATACGAGCGATGGTTGTTCCACGCACTGATAACATCACCTTGGCAATCCTGGCTGCTCTGAC |
| | ACCACTGGCCCGGGGCACACTGCTTGTGGCGTGGAGAGCAGGCCTTGCTACTTGCGGGGGGTTTATG |
| | CTCCTCTCTCTGAAGGGAAAAGGCAGTGTGAAGAAGAACTTACCATTTGTCATGGCCCTGGGACTAA |
| | CCGCTGTGAGGCTGGTCGACCCCATCAACGTGGTGGGACTGCTGTTGCTCACAAGGAGTGGGAAGCG |
| | GAGCTGGCCCCCTAGCGAAGTACTCACAGCTGTTGGCCTGATATGCGCATTGGCTGGAGGGTTCGCC |
| | AAGGCAGATATAGAGATGGCTGGGCCCATGGCCGCGGTCGGTCTGCTAATTGTCAGTTACGTGGTCT |
| | CAGGAAAGAGTGTGGACATGTACATTGAAAGAGCAGGTGACATCACATGGGAAAAAGATGCGGAAGT |
| | CACTGGAAACAGTCCCCGGCTCGATGTGGCGCTAGATGAGAGTGGTGATTTCTCCCTGGTGGAGGAT |
| | GACGGTCCCCCCATGAGAGAGATCATACTCAAGGTGGTCCTGATGACCATCTGTGGCATGAACCCAA |
| | TAGCCATACCCTTCGCAGCTGGAGCGTGGTACGTATACGTGAAGACTGGAAAAAGGAGTGGTGCTCT |
| | ATGGGATGTGCCTGCTCCCAAGGAAGTAAAAAAGGGGGAGACCACAGATGGAGTGTACAGAGTAATG |
| | ACTCGTAGACTGCTAGGTTCAACACAAGTTGGAGTGGGAGTTATGCAAGAGGGGGTCTTTCACACTA |
| | TGTGGCACGTCACAAAAGGATCCGCACTGAGAAGCGGTGAAGGGAGACTTGATCCATACTGGGGAGA |
| | TGTCAAGCAGGATCTGGTGTCATACTGTGGTCCATGGAAGCTAGATGCCGCCTGGGACGGGCACAGC |
| | GAGGTGCAGCTCTTGGCCGTGCCCCCCGGAGAGAGAGCGAGGAACATCCAGACTCTGCCCGGAATAT |
| | TTAAGACAAAGGATGGGGACATTGGAGCGGTTGCGCTGGATTACCCAGCAGGAACTTCAGGATCTCC |
| | AATCCTAGACAAGTGTGGGAGAGTGATAGGACTTTATGGCAATGGGGTCGTGATCAAAAATGGGAGT |
| | TATGTTAGTGCCATCACCCAAGGGAGGAGGGAGGAAGAGACTCCTGTTGAGTGCTTCGAGCCTTCGA |
| | TGCTGAAGAAGAAGCAGCTAACTGTCTTAGACTTACATCCTGGAGCTGGGAAAACCAGGAGAGTTCT |
| | TCCTGAAATAGTCCGTGAAGCCATAAAAACAAGACTCCGTACTGTGATCTTAGCTCCAACCAGGGTT |
| | GTCGCTGCTGAAATGGAGGAGGCCCTTAGAGGGCTTCCAGTGCGTTATATGACAACAGCAGTCAATG |
| | TCACCCACTCTGGAACAGAAATCGTCGACTTAATGTGCCATGCCACCTTCACTTCACGTCTACTACA |
| | GCCAATCAGAGTCCCCAACTATAATCTGTATATTATGGATGAGGCCCACTTCACAGATCCCTCAAGT |
| | ATAGCAGCAAGAGGATACATTTCAACAAGGGTTGAGATGGGCGAGGCGGCTGCCATCTTCATGACCG |
| | CCACGCCACCAGGAACCCGTGACGCATTTCCGGACTCCAACTCACCAATTATGGACACCGAAGTGGA |
| | AGTCCCAGAGAGAGCCTGGAGCTCAGGCTTTGATTGGGTGACGGATCATTCTGGAAAAACAGTTTGG |
| | TTTGTTCCAAGCGTGAGGAACGGCAATGAGATCGCAGCTTGTCTGACAAAGGCTGGAAAACGGGTCA |
| | TACAGCTCAGCAGAAAGACTTTTGAGACAGAGTTCCAGAAAACAAAACATCAAGAGTGGGACTTTGT |
| | CGTGACAACTGACATTTCAGAGATGGGCGCCAACTTTAAAGCTGACCGTGTCATAGATTCCAGGAGA |
| | TGCCTAAAGCCGGTCATACTTGATGGCGAGAGAGTCATTCTGGCTGGACCCATGCCTGTCACACATG |
| | CCAGCGCTGCCCAGAGGAGGGGGCGCATAGGCAGGAATCCCAACAAACCTGGAGATGAGTATCTGTA |
| | TGGAGGTGGGTGCGCAGAGACTGACGAAGACCATGCACACTGGCTTGAAGCAAGAATGCTCCTTGAC |
| | AATATTTACCTCCAAGATGGCCTCATAGCCTCGCTCTATCGACCTGAGGCCGACAAAGTAGCAGCCA |
| | TTGAGGGAGAGTTCAAGCTTAGGACGGAGCAAAGGAAGACCTTTGTGGAACTCATGAAAAGAGGAGA |
| | TCTTCCTGTTTGGCTGGCCTATCAGGTTGCATCTGCCGGAATAACCTACACAGATAGAAGATGGTGC |
| | TTTGATGGCACGACCAACAACACCATACTGGAAGACAGCGTGCCGGCAGAGGTGTGGACCAGACACG |
| | GAGAGAAAAGAGTGCTCAAACCGAGGTGGATGGACGCCAGAGTTTGTTCAGATCATGCGGCCCTGAA |
| | GTCATTCAAGGAGTTTGCCGCTGGGAAAAGAGGAGCGGCTTTTGGAGTGATGGAAGCCCTGGGAACA |
| | CTGCCAGGACACATGACAGAGAGATTCCAGGAAGCCATTGACAACCTCGCTGTGCTCATGCGGGCAG |
| | AGACTGGAAGCAGGCCTTACAAAGCCGCGGCGGCCCAATTGCCGGAGACCCTAGAGACCATTATGCT |
| | TTTGGGGTTGCTGGGAACAGTCTCGCTGGGAATCTTTTTCGTCTTGATGAGGAACAAGGGCATAGGG |
| | AAGATGGGCTTTGGAATGGTGACCCTTGGGGCCAGTGCATGGCTCATGTGGCTCTCGGAAATTGAGC |
| | CAGCCAGAATTGCATGCGTCCTCATTGTTGTGTTCCTATTGCTGGTGGTGCTCATACCTGAGCCAGA |
| | AAAGCAAAGATCTCCCCAGGACAACCAAATGGCAATCATCATCATGGTAGCAGTAGGTCTTCTGGGC |
| | TTGATTACCGCCAATGAACTCGGATGGTTGGAGAGAACAAAGAGTGACCTAAGCCATCTAATGGGAA |
| | GGAGAGAGGAGGGGGCAACCATAGGATTCTCAATGGACATTGACCTGCGGCCAGCCTCAGCTTGGGC |
| | CATCTATGCTGCCTTGACAACTTTCATTACCCCAGCCGTCCAACATGCAGTGACCACTTCATACAAC |
| | AACTACTCCTTAATGGCGATGGCCACGCAAGCTGGAGTGTTGTTTGGTATGGGCAAAGGGATGCCAT |
| | TCTACGCATGGGACTTTGGAGTCCCGCTGCTAATGATAGGTTGCTACTCACAATTAACACCCCTGAC |
| | CCTAATAGTGGCCATCATTTTGCTCGTGGCGCACTACATGTACTTGATCCCAGGGCTGCAGGCAGCA |
| | GCTGCGCGTGCTGCCCAGAAGAGAACGGCAGCTGGCATCATGAAGAACCCTGTTGTGGATGGAATAG |
| | TGGTGACTGACATTGACACAATGACAATTGACCCCCAAGTGGAGAAAAAGATGGGACAGGTGCTACT |
| | CATAGCAGTAGCCGTCTCCAGCGCCATACTGTCGCGGACCGCCTGGGGGTGGGGGGAGGCTGGGGCC |
| | CTGATCACAGCCGCAACTTCCACTTTGTGGGAAGGCTCTCCGAACAAGTACTGGAACTCCTCTACAG |
| | CCACTTCACTGTGTAACATTTTTAGGGGAAGTTACTTGGCTGGAGCCTCTCTAATCTACACAGTAAC |
| | AAGAAACGCTGGCTTGGTCAAGAGACGTGGGGGTGGAACAGGAGAGACCCTGGGAGAGAAATGGAAG |
| | GCCCGCTTGAACCAGATGTCGGCCCTGGAGTTCTACTCCTACAAAAAGTCAGGCATCACCGAGGTGT |
| | GCAGAGAAGAGGCCCGCCGCGCCCTCAAGGACGGTGTGGCAACGGGAGGCCATGCTGTGTCCCGAGG |
| | AAGTGCAAAGCTGAGATGGTTGGTGGAGCGGGGATACCTGCAGCCCTATGGAAAGGTCATTGATCTT |
| | GGATGTGGCAGAGGGGGCTGGAGTTACTACGCCGCCACCATCCGCAAAGTTCAAGAAGTGAAAGGAT |
| | ACACAAAAGGAGGCCCTGGTCATGAAGAACCCGTGTTGGTGCAAAGCTATGGGTGGAACATTGTCCG |
| | TCTTAAGAGTGGGGTGGACGTCTTTCATATGGCGGCTGAGCCGTGTGACACGTTGCTGTGTGACATA |
| | GGTGAGTCATCATCTAGTCCTGAAGTGGAAGAAGCACGGACGCTCAGAGTCCTCTCCATGGTGGGGG |
| | ATTGGCTTGAAAAAAGACCAGGAGCCTTTTGTATAAAAGTGTTGTGCCCATACACCAGCACTATGAT |
| | GGAAACCCTGGAGCGACTGCAGCGTAGGTATGGGGGAGGACTGGTCAGAGTGCCACTCTCCCGCAAC |
| | TCTACACATGAGATGTACTGGGTCTCTGGAGCGAAAAGCAACACCATAAAAAGTGTGTCCACCACGA |
| | GCCAGCTCCTCTTGGGGCGCATGGACGGGCCTAGGAGGCCAGTGAAATATGAGGAGGATGTGAATCT |
| | CGGCTCTGGCACGCGGGCTGTGGTAAGCTGCGCTGAAGCTCCCAACATGAAGATCATTGGTAACCGC |
| | ATTGAAAGGATCCGCAGTGAGCACGCGGAAACGTGGTTCTTTGACGAGAACCACCCATATAGGACAT |
| | GGGCTTACCATGGAAGCTATGAGGCCCCCACACAAGGGTCAGCGTCCTCTCTAATAAACGGGGTTGT |
| | CAGGCTCCTGTCAAAACCCTGGGATGTGGTGACTGGAGTCACAGGAATAGCCATGACCGACACCACA |
| | CCGTATGGTCAGCAAAGAGTTTTCAAGGAAAAAGTGGACACTAGGGTGCCAGACCCCCAAGAAGGCA |
| | CTCGTCAGGTTATGAGCATGGTCTCTTCCTGGTTGTGGAAAGAGCTAGGCAAACACAAACGGCCACG |
| | AGTCTGTACCAAAGAAGAGTTCATCAACAAGGTTCGTAGCAATGCAGCATTAGGGGCAATATTTGAA |
| | GAGGAAAAAGAGTGGAAGACTGCAGTGGAAGCTGTGAAGGATCGAAGGTTCTGGGCTCTAGTGGACA |
| | AGGAAAGAGAGCACCACCTGAGAGGAGAGTGCCAGAGTTGTGTGTACAACATGATGGGAAAAAGAGA |
| | AAAGAAACAAGGGGAATTTGGAAAGGCCAAGGGCAGCCGCGCCATCTGGTATATGTGGCTAGGGGCT |
| | AGATTTCTAGAGTTCGAAGCCCTTGGATTCTTGAACGAGGATCACTGGATGGGGAGAGAGAACTCAG |
| | GAGGTGGTGTTGAAGGGCTGGGATTACAAAGACTCGGATATGTCCTAGAAGAGATGAGTTGCATACC |
| | AGGAGGAAGGATGTATGCAGATGACACTGCTGGCTGGGACACCCGCATCAGCAGGTTTGATCTGGAG |
| | AATGAAGCTCTAATCACCAACCAAATGGAGAAAGGGCACAGGGCCTTGGCATTGGCCATAATCAAGT |
| | ACACATACCAAAACAAAGTGGTAAAGGTCCTTAGACCAGCTGAAAAAGGGAAAACAGTTATGGACAT |
| | TATTTCGAGACAAGACCAAAGGGGGAGCGGACAAGTTGTCACTTACGCTCTTAACACATTTACCAAC |
| | CTAGTGGTGCAACTCATTCGGAATATGGAGGCTGAGGAAGTTCTAGAGATGCAAGACTTGTGGCTGC |
| | TGCGGAGGTCAGAGAAAGTGACCAACTGGTTGCAGAGCAACGGATGGGATAGGCTCAAACGAATGGC |
| | AGTCAGTGGAGATGATTGCGTTGTGAAGCCAATTGATGATAGGTTTGCACATGCCCTCAGGTTCTTG |
| | AATGATATGGGAAAAGTTAGGAAGGACACACAAGAGTGGAAACCCTCAACTGGATGGGACAACTGGG |
| | AAGAAGTTCCGTTTTGCTCCCACCACTTCAACAAGCTCCATCTCAAGGACGGGAGGTCCATTGTGGT |
| | TCCCTGCCGCCACCAAGATGAACTGATTGGCCGGGCCCGCGTCTCTCCAGGGGCGGGATGGAGCATC |
| | CGGGAGACTGCTTGCCTAGCAAAATCATATGCGCAAATGTGGCAGCTCCTTTATTTCCACAGAAGGG |
| | ACCTCCGACTGATGGCCAATGCCATTTGTTCATCTGTGCCAGTTGACTGGGTTCCAACTGGGAGAAC |
| | TACCTGGTCAATCCATGGAAAGGGAGAATGGATGACCACTGAAGACATGGTTGTGGTGTGGAACAGA |
| | GTGTGGATTGAGGAGAACGACCACATGGAAGACAAGACCCCAGTTACGAAATGGACAGACATTCCCT |
| | ATTTGGGAAAAAGGGAAGACTTGTGGTGTGGATCTCTCATAGGGCACAGACCGCGCACCACCTGGGC |
| | TGAGAACATTAAAAACACAGTCAACATGGTGCGCAGGATCATAGGTGATGAAGAAAAGTACATGGAC |
| | TACCTATCCACCCAAGTTCGCTACTTGGGTGAAGAAGGGTCTACACCTGGAGTGCTGTAAGCACCAA |
| | TCTTAACGTTGTCAGGCCTGCTAGTCAGCCACAGCTTGGGGAAAGCTGTGCAGCCTGTGACCCCCCC |
| | AGGAGAAGCTGGGAAACCAAGCCTATAGTCAGGCCGAGAACGCCATGGCACGGAAGAAGCCATGCTG |
| | CCTGTGAGCCCCTCAGAGGACACTGAGTCAAAAAACCCCACGCGCTTGGAGGCGCAGGATGGGAAAA |
| | GAAGGTGGCGACCTTCCCCACCCTTCAATCTGGGGCCTGAACTGGAGATCAGCTGTGGATCTCCAGA |
| | AGAGGGACTAGTGGTTAGAGGAGACCCCCCGGAAAACGCAAAACAGCATATTGACGCTGGGAAAGAC |
| | CAGAGACTCCATGAGTTTCCACCACGCTGGCCGCCAGGCACAGATCGCCGAATAGCGGCGGCCGGTG |
| | TGGGGAAATCCATGGGTCT |
| 297 | GenBank Accession No. AY632535.2 (Zika virus strain MR 766, complete |
| | genome) |
| | AGTTGTTGATCTGTGTGAGTCAGACTGCGACAGTTCGAGTCTGAAGCGAGAGCTAACAACAGTATCA |
| | ACAGGTTTAATTTGGATTTGGAAACGAGAGTTTCTGGTCATGAAAAACCCCAAAGAAGAAATCCGGA |
| | GGATCCGGATTGTCAATATGCTAAAACGCGGAGTAGCCCGTGTAAACCCCTTGGGAGGTTTGAAGAG |
| | GTTGCCAGCCGGACTTCTGCTGGGTCATGGACCCATCAGAATGGTTTTGGCGATACTAGCCTTTTTG |
| | AGATTTACAGCAATCAAGCCATCACTGGGCCTTATCAACAGATGGGGTTCCGTGGGGAAAAAAGAGG |
| | CTATGGAAATAATAAAGAAGTTCAAGAAAGATCTTGCTGCCATGTTGAGAATAATCAATGCTAGGAA |
| | AGAGAGGAAGAGACGTGGCGCAGACACCAGCATCGGAATCATTGGCCTCCTGCTGACTACAGCCATG |
| | GCAGCAGAGATCACTAGACGCGGGAGTGCATACTACATGTACTTGGATAGGAGCGATGCCGGGAAGG |
| | CCATTTCGTTTGCTACCACATTGGGAGTGAACAAGTGCCACGTACAGATCATGGACCTCGGGCACAT |
| | GTGTGACGCCACCATGAGTTATGAGTGCCCTATGCTGGATGAGGGAGTGGAACCAGATGATGTCGAT |
| | TGCTGGTGCAACACGACATCAACTTGGGTTGTGTACGGAACCTGTCATCACAAAAAAGGTGAGGCAC |
| | GGCGATCTAGAAGAGCCGTGACGCTCCCTTCTCACTCTACAAGGAAGTTGCAAACGCGGTCGCAGAC |
| | CTGGTTAGAATCAAGAGAATACACGAAGCACTTGATCAAGGTTGAAAACTGGATATTCAGGAACCCC |
| | GGGTTTGCGCTAGTGGCCGTTGCCATTGCCTGGCTTTTGGGAAGCTCGACGAGCCAAAAAGTCATAT |
| | ACTTGGTCATGATACTGCTGATTGCCCCGGCATACAGTATCAGGTGCATTGGAGTCAGCAATAGAGA |
| | CTTCGTGGAGGGCATGTCAGGTGGGACCTGGGTTGATGTTGTCTTGGAACATGGAGGCTGCGTTACC |
| | GTGATGGCACAGGACAAGCCAACAGTCGACATAGAGTTGGTCACGACGACGGTTAGTAACATGGCCG |
| | AGGTAAGATCCTATTGCTACGAGGCATCGATATCGGACATGGCTTCGGACAGTCGTTGCCCAACACA |
| | AGGTGAAGCCTACCTTGACAAGCAATCAGACACTCAATATGTCTGCAAAAGAACATTAGTGGACAGA |
| | GGTTGGGGAAACGGTTGTGGACTTTTTGGCAAAGGGAGCTTGGTGACATGTGCCAAGTTTACGTGTT |
| | CTAAGAAGATGACCGGGAAGAGCATTCAACCGGAAAATCTGGAGTATCGGATAATGCTATCAGTGCA |
| | TGGCTCCCAGCATAGCGGGATGATTGGATATGAAACTGACGAAGATAGAGCGAAAGTCGAGGTTACG |
| | CCTAATTCACCAAGAGCGGAAGCAACCTTGGGAGGCTTTGGAAGCTTAGGACTTGACTGTGAACCAA |
| | GGACAGGCCTTGACTTTTCAGATCTGTATTACCTGACCATGAACAATAAGCATTGGTTGGTGCACAA |
| | AGAGTGGTTTCATGACATCCCATTGCCTTGGCATGCTGGGGCAGACACCGGAACTCCACACTGGAAC |
| | AACAAAGAGGCATTGGTAGAATTCAAGGATGCCCACGCCAAGAGGCAAACCGTCGTCGTTCTGGGGA |
| | GCCAGGAAGGAGCCGTTCACACGGCTCTCGCTGGAGCTCTAGAGGCTGAGATGGATGGTGCAAAGGG |
| | AAGGCTGTTCTCTGGCCATTTGAAATGCCGCCTAAAAATGGACAAGCTTAGATTGAAGGGCGTGTCA |
| | TATTCCTTGTGCACTGCGGCATTCACATTCACCAAGGTCCCAGCTGAAACACTGCATGGAACAGTCA |
| | CAGTGGAGGTGCAGTATGCAGGGACAGATGGACCCTGCAAGATCCCAGTCCAGATGGCGGTGGACAT |
| | GCAGACCCTGACCCCAGTTGGAAGGCTGATAACCGCCAACCCCGTGATTACTGAAAGCACTGAGAAC |
| | TCAAAGATGATGTTGGAGCTTGACCCACCATTTGGGGATTCTTACATTGTCATAGGAGTTGGGGACA |
| | AGAAAATCACCCACCACTGGCATAGGAGTGGTAGCACCATCGGAAAGGCATTTGAGGCCACTGTGAG |
| | AGGCGCCAAGAGAATGGCAGTCCTGGGGGATACAGCCTGGGACTTCGGATCAGTCGGGGGTGTGTTC |
| | AACTCACTGGGTAAGGGCATTCACCAGATTTTTGGAGCAGCCTTCAAATCACTGTTTGGAGGAATGT |
| | CCTGGTTCTCACAGATCCTCATAGGCACGCTGCTAGTGTGGTTAGGTTTGAACACAAAGAATGGATC |
| | TATCTCCCTCACATGCTTGGCCCTGGGGGGAGTGATGATCTTCCTCTCCACGGCTGTTTCTGCTGAC |
| | GTGGGGTGCTCAGTGGACTTCTCAAAAAAGGAAACGAGATGTGGCACGGGGGTATTCATCTATAATG |
| | ATGTTGAAGCCTGGAGGGACCGGTACAAGTACCATCCTGACTCCCCCCGCAGATTGGCAGCAGCAGT |
| | CAAGCAGGCCTGGGAAGAGGGGATCTGTGGGATCTCATCCGTTTCAAGAATGGAAAACATCATGTGG |
| | AAATCAGTAGAAGGGGAGCTCAATGCTATCCTAGAGGAGAATGGAGTTCAACTGACAGTTGTTGTGG |
| | GATCTGTAAAAAACCCCATGTGGAGAGGTCCACAAAGATTGCCAGTGCCTGTGAATGAGCTGCCCCA |
| | TGGCTGGAAAGCCTGGGGGAAATCGTATTTTGTTAGGGCGGCAAAGACCAACAACAGTTTTGTTGTC |
| | GACGGTGACACACTGAAGGAATGTCCGCTTGAGCACAGAGCATGGAATAGTTTTCTTGTGGAGGATC |
| | ACGGGTTTGGAGTCTTCCACACCAGTGTCTGGCTTAAGGTCAGAGAAGATTACTCATTAGAATGTGA |
| | CCCAGCCGTCATAGGAACAGCTGTTAAGGGAAGGGAGGCCGCGCACAGTGATCTGGGCTATTGGATT |
| | GAAAGTGAAAAGAATGACACATGGAGGCTGAAGAGGGCCCACCTGATTGAGATGAAAACATGTGAAT |
| | GGCCAAAGTCTCACACATTGTGGACAGATGGAGTAGAAGAAAGTGATCTTATCATACCCAAGTCTTT |
| | AGCTGGTCCACTCAGCCACCACAACACCAGAGAGGGTTACAGAACCCAAGTGAAAGGGCCATGGCAC |
| | AGTGAAGAGCTTGAAATCCGGTTTGAGGAATGTCCAGGCACCAAGGTTTACGTGGAGGAGACATGCG |
| | GAACTAGAGGACCATCTCTGAGATCAACTACTGCAAGTGGAAGGGTCATTGAGGAATGGTGCTGTAG |
| | GGAATGCACAATGCCCCCACTATCGTTTCGAGCAAAAGACGGCTGCTGGTATGGAATGGAGATAAGG |
| | CCCAGGAAAGAACCAGAGAGCAACTTAGTGAGGTCAATGGTGACAGCGGGGTCAACCGATCATATGG |
| | ACCACTTCTCTCTTGGAGTGCTTGTGATTCTACTCATGGTGCAGGAGGGGTTGAAGAAGAGAATGAC |
| | CACAAAGATCATCATGAGCACATCAATGGCAGTGCTGGTAGTCATGATCTTGGGAGGATTTTCAATG |
| | AGTGACCTGGCCAAGCTTGTGATCCTGATGGGTGCTACTTTCGCAGAAATGAACACTGGAGGAGATG |
| | TAGCTCACTTGGCATTGGTAGCGGCATTTAAAGTCAGACCAGCCTTGCTGGTCTCCTTCATTTTCAG |
| | AGCCAATTGGACACCCCGTGAGAGCATGCTGCTAGCCCTGGCTTCGTGTCTTCTGCAAACTGCGATC |
| | TCTGCTCTTGAAGGTGACTTGATGGTCCTCATTAATGGATTTGCTTTGGCCTGGTTGGCAATTCGAG |
| | CAATGGCCGTGCCACGCACTGACAACATCGCTCTACCAATCTTGGCTGCTCTAACACCACTAGCTCG |
| | AGGCACACTGCTCGTGGCATGGAGAGCGGGCCTGGCTACTTGTGGAGGGATCATGCTCCTCTCCCTG |
| | AAAGGGAAAGGTAGTGTGAAGAAGAACCTGCCATTTGTCATGGCCCTGGGATTGACAGCTGTGAGGG |
| | TAGTAGACCCTATTAATGTGGTAGGACTACTGTTACTCACAAGGAGTGGGAAGCGGAGCTGGCCCCC |
| | TAGTGAAGTTCTCACAGCCGTTGGCCTGATATGTGCACTGGCCGGAGGGTTTGCCAAGGCAGACATT |
| | GAGATGGCTGGACCCATGGCTGCAGTAGGCTTGCTAATTGTCAGCTATGTGGTCTCGGGAAAGAGTG |
| | TGGACATGTACATTGAAAGAGCAGGTGACATCACATGGGAAAAGGACGCGGAAGTCACTGGAAACAG |
| | TCCTCGGCTTGACGTGGCACTGGATGAGAGTGGTGACTTCTCCTTGGTAGAGGAAGATGGTCCACCC |
| | ATGAGAGAGATCATACTCAAGGTGGTCCTGATGGCCATCTGTGGCATGAACCCAATAGCTATACCTT |
| | TTGCTGCAGGAGCGTGGTATGTGTATGTGAAGACTGGGAAAAGGAGTGGCGCCCTCTGGGACGTGCC |
| | TGCTCCCAAAGAAGTGAAGAAAGGAGAGACCACAGATGGAGTGTACAGAGTGATGACTCGCAGACTG |
| | CTAGGTTCAACACAGGTTGGAGTGGGAGTCATGCAAGAGGGAGTCTTCCACACCATGTGGCACGTTA |
| | CAAAAGGAGCCGCACTGAGGAGCGGTGAGGGAAGACTTGATCCATACTGGGGGGATGTCAAGCAGGA |
| | CTTGGTGTCATACTGTGGGCCTTGGAAGTTGGATGCAGCTTGGGATGGACTCAGCGAGGTACAGCTT |
| | TTGGCCGTACCTCCCGGAGAGAGGGCCAGAAACATTCAGACCCTGCCTGGAATATTCAAGACAAAGG |
| | ACGGGGACATCGGAGCAGTTGCTCTGGACTACCCTGCAGGGACCTCAGGATCTCCGATCCTAGACAA |
| | ATGTGGAAGAGTGATAGGACTCTATGGCAATGGGGTTGTGATCAAGAATGGAAGCTATGTTAGTGCT |
| | ATAACCCAGGGAAAGAGGGAGGAGGAGACTCCGGTTGAATGTTTCGAACCCTCGATGCTGAAGAAGA |
| | AGCAGCTAACTGTCTTGGATCTGCATCCAGGAGCCGGAAAAACCAGGAGAGTTCTTCCTGAAATAGT |
| | CCGTGAAGCCATAAAAAAGAGACTCCGGACAGTGATCTTGGCACCAACTAGGGTTGTCGCTGCTGAG |
| | ATGGAGGAGGCCTTGAGAGGACTTCCGGTGCGTTACATGACAACAGCAGTCAACGTCACCCATTCTG |
| | GGACAGAAATCGTTGATTTGATGTGCCATGCCACTTTCACTTCACGCTTACTACAACCCATCAGAGT |
| | CCCTAATTACAATCTCAACATCATGGATGAAGCCCACTTCACAGACCCCTCAAGTATAGCTGCAAGA |
| | GGATACATATCAACAAGGGTTGAAATGGGCGAGGCGGCTGCCATTTTTATGACTGCCACACCACCAG |
| | GAACCCGTGATGCGTTTCCTGACTCTAACTCACCAATCATGGACACAGAAGTGGAAGTCCCAGAGAG |
| | AGCCTGGAGCTCAGGCTTTGATTGGGTGACAGACCATTCTGGGAAAACAGTTTGGTTCGTTCCAAGC |
| | GTGAGAAACGGAAATGAAATCGCAGCCTGTCTGACAAAGGCTGGAAAGCGGGTCATACAGCTCAGCA |
| | GGAAGACTTTTGAGACAGAATTTCAGAAAACAAAAAATCAAGAGTGGGACTTTGTCATAACAACTGA |
| | CATCTCAGAGATGGGCGCCAACTTCAAGGCTGACCGGGTCATAGACTCTAGGAGATGCCTAAAACCA |
| | GTCATACTTGATGGTGAGAGAGTCATCTTGGCTGGGCCCATGCCTGTCACGCATGCTAGTGCTGCTC |
| | AGAGGAGAGGACGTATAGGCAGGAACCCTAACAAACCTGGAGATGAGTACATGTATGGAGGTGGGTG |
| | TGCAGAGACTGATGAAGGCCATGCACACTGGCTTGAAGCAAGAATGCTTCTTGACAACATCTACCTC |
| | CAGGATGGCCTCATAGCCTCGCTCTATCGGCCTGAGGCCGATAAGGTAGCCGCCATTGAGGGAGAGT |
| | TTAAGCTGAGGACAGAGCAAAGGAAGACCTTCGTGGAACTCATGAAGAGAGGAGACCTTCCCGTCTG |
| | GCTAGCCTATCAGGTTGCATCTGCCGGAATAACTTACACAGACAGAAGATGGTGCTTTGATGGCACA |
| | ACCAACAACACCATAATGGAAGACAGTGTACCAGCAGAGGTTTGGACAAAGTATGGAGAGAAGAGAG |
| | TGCTCAAACCGAGATGGATGGATGCTAGGGTCTGTTCAGACCATGCGGCCCTGAAGTCGTTCAAAGA |
| | ATTCGCCGCTGGAAAAAGAGGAGCGGCTTTGGGAGTAATGGAGGCCCTGGGAACACTGCCAGGACAC |
| | ATGACAGAGAGGTTTCAGGAAGCCATTGACAACCTCGCCGTGCTCATGCGAGCAGAGACTGGAAGCA |
| | GGCCTTATAAGGCAGCGGCAGCCCAACTGCCGGAGACCCTAGAGACCATTATGCTCTTAGGTTTGCT |
| | GGGAACAGTTTCACTGGGGATCTTCTTCGTCTTGATGCGGAATAAGGGCATCGGGAAGATGGGCTTT |
| | GGAATGGTAACCCTTGGGGCCAGTGCATGGCTCATGTGGCTTTCGGAAATTGAACCAGCCAGAATTG |
| | CATGTGTCCTCATTGTTGTGTTTTTATTACTGGTGGTGCTCATACCCGAGCCAGAGAAGCAAAGATC |
| | TCCCCAAGATAACCAGATGGCAATTATCATCATGGTGGCAGTGGGCCTTCTAGGTTTGATAACTGCA |
| | AACGAACTTGGATGGCTGGAAAGAACAAAAAATGACATAGCTCATCTAATGGGAAGGAGAGAAGAAG |
| | GAGCAACCATGGGATTCTCAATGGACATTGATCTGCGGCCAGCCTCCGCCTGGGCTATCTATGCCGC |
| | ATTGACAACTCTCATCACCCCAGCTGTCCAACATGCGGTAACCACTTCATACAACAACTACTCCTTA |
| | ATGGCGATGGCCACACAAGCTGGAGTGCTGTTTGGCATGGGCAAAGGGATGCCATTTATGCATGGGG |
| | ACCTTGGAGTCCCGCTGCTAATGATGGGTTGCTATTCACAATTAACACCCCTGACTCTGATAGTAGC |
| | TATCATTCTGCTTGTGGCGCACTACATGTACTTGATCCCAGGCCTACAAGCGGCAGCAGCGCGTGCT |
| | GCCCAGAAAAGGACAGCAGCTGGCATCATGAAGAATCCCGTTGTGGATGGAATAGTGGTAACTGACA |
| | TTGACACAATGACAATAGACCCCCAGGTGGAGAAGAAGATGGGACAAGTGTTACTCATAGCAGTAGC |
| | CATCTCCAGTGCTGTGCTGCTGCGGACCGCCTGGGGATGGGGGGAGGCTGGAGCTCTGATCACAGCA |
| | GCGACCTCCACCTTGTGGGAAGGCTCTCCAAACAAATACTGGAACTCCTCTACAGCCACCTCACTGT |
| | GCAACATCTTCAGAGGAAGCTATCTGGCAGGAGCTTCCCTTATCTATACAGTGACGAGAAACGCTGG |
| | CCTGGTTAAGAGACGTGGAGGTGGGACGGGAGAGACTCTGGGAGAGAAGTGGAAAGCTCGTCTGAAT |
| | CAGATGTCGGCCCTGGAGTTCTACTCTTATAAAAAGTCAGGTATCACTGAAGTGTGTAGAGAGGAGG |
| | CTCGCCGTGCCCTCAAGGATGGAGTGGCCACAGGAGGACATGCCGTATCCCGGGGAAGTGCAAAGAT |
| | CAGATGGTTGGAGGAGAGAGGATATCTGCAGCCCTATGGGAAGGTTGTTGACCTCGGATGTGGCAGA |
| | GGGGGCTGGAGCTATTATGCCGCCACCATCCGCAAAGTGCAGGAGGTGAGAGGATACACAAAGGGAG |
| | GTCCCGGTCATGAAGAACCCATGCTGGTGCAAAGCTATGGGTGGAACATAGTTCGTCTCAAGAGTGG |
| | AGTGGACGTCTTCCACATGGCGGCTGAGCCGTGTGACACTCTGCTGTGTGACATAGGTGAGTCATCA |
| | TCTAGTCCTGAAGTGGAAGAGACACGAACACTCAGAGTGCTCTCTATGGTGGGGGACTGGCTTGAAA |
| | AAAGACCAGGGGCCTTCTGTATAAAGGTGCTGTGCCCATACACCAGCACTATGATGGAAACCATGGA |
| | GCGACTGCAACGTAGGCATGGGGGAGGATTAGTCAGAGTGCCATTGTGTCGCAACTCCACACATGAG |
| | ATGTACTGGGTCTCTGGGGCAAAGAGCAACATCATAAAAAGTGTGTCCACCACAAGTCAGCTCCTCC |
| | TGGGACGCATGGATGGCCCCAGGAGGCCAGTGAAATATGAGGAGGATGTGAACCTCGGCTCGGGTAC |
| | ACGAGCTGTGGCAAGCTGTGCTGAGGCTCCTAACATGAAAATCATCGGCAGGCGCATTGAGAGAATC |
| | CGCAATGAACATGCAGAAACATGGTTTCTTGATGAAAACCACCCATACAGGACATGGGCCTACCATG |
| | GGAGCTACGAAGCCCCCACGCAAGGATCAGCGTCTTCCCTCGTGAACGGGGTTGTTAGACTCCTGTC |
| | AAAGCCTTGGGACGTGGTGACTGGAGTTACAGGAATAGCCATGACTGACACCACACCATACGGCCAA |
| | CAAAGAGTCTTCAAAGAAAAAGTGGACACCAGGGTGCCAGATCCCCAAGAAGGCACTCGCCAGGTAA |
| | TGAACATAGTCTCTTCCTGGCTGTGGAAGGAGCTGGGGAAACGCAAGCGGCCACGCGTCTGCACCAA |
| | AGAAGAGTTTATCAACAAGGTGCGCAGCAATGCAGCACTGGGAGCAATATTTGAAGAGGAAAAAGAA |
| | TGGAAGACGGCTGTGGAAGCTGTGAATGATCCAAGGTTTTGGGCCCTAGTGGATAGGGAGAGAGAAC |
| | ACCACCTGAGAGGAGAGTGTCACAGCTGTGTGTACAACATGATGGGAAAAAGAGAAAAGAAGCAAGG |
| | AGAGTTCGGGAAAGCAAAAGGTAGCCGCGCCATCTGGTACATGTGGTTGGGAGCCAGATTCTTGGAG |
| | TTTGAAGCCCTTGGATTCTTGAACGAGGACCATTGGATGGGAAGAGAAAACTCAGGAGGTGGAGTCG |
| | AAGGGTTAGGATTGCAAAGACTTGGATACATTCTAGAAGAAATGAATCGGGCACCAGGAGGAAAGAT |
| | GTACGCAGATGACACTGCTGGCTGGGACACCCGCATTAGTAAGTTTGATCTGGAGAATGAAGCTCTG |
| | ATTACCAACCAAATGGAGGAAGGGCACAGAACTCTGGCGTTGGCCGTGATTAAATACACATACCAAA |
| | ACAAAGTGGTGAAGGTTCTCAGACCAGCTGAAGGAGGAAAAACAGTTATGGACATCATTTCAAGACA |
| | AGACCAGAGAGGGAGTGGACAAGTTGTCACTTATGCTCTCAACACATTCACCAACTTGGTGGTGCAG |
| | CTTATCCGGAACATGGAAGCTGAGGAAGTGTTAGAGATGCAAGACTTATGGTTGTTGAGGAAGCCAG |
| | AGAAAGTGACCAGATGGTTGCAGAGCAATGGATGGGATAGACTCAAACGAATGGCGGTCAGTGGAGA |
| | TGACTGCGTTGTGAAGCCAATCGATGATAGGTTTGCACATGCCCTCAGGTTCTTGAATGACATGGGA |
| | AAAGTTAGGAAAGACACACAGGAGTGGAAACCCTCGACTGGATGGAGCAATTGGGAAGAAGTCCCGT |
| | TCTGCTCCCACCACTTCAACAAGCTGTACCTCAAGGATGGGAGATCCATTGTGGTCCCTTGCCGCCA |
| | CCAAGATGAACTGATTGGCCGAGCTCGCGTCTCACCAGGGGCAGGATGGAGCATCCGGGAGACTGCC |
| | TGTCTTGCAAAATCATATGCGCAGATGTGGCAGCTCCTTTATTTCCACAGAAGAGACCTTCGACTGA |
| | TGGCTAATGCCATTTGCTCGGCTGTGCCAGTTGACTGGGTACCAACTGGGAGAACCACCTGGTCAAT |
| | CCATGGAAAGGGAGAATGGATGAGCAGTGAGGACATGOTCATGGTGTGGAATAGAGTGTGGATTGAG |
| | GAGAACGACCATATGGAGGACAAGACTCCTGTAACAAAATGGACAGACATTCCCTATCTAGGAAAAA |
| | GGGAGGACTTATGGTGTGGATCCCTTATAGGGCACAGACCCCGCACCACTTGGGCTGAAAACATCAA |
| | AGACACAGTCAACATGGTGCGCAGGATCATAGGTGATGAAGAAAAGTACATGGACTATCTATCCACC |
| | CAAGTCCGCTACTTGGGTGAGGAAGGGTCCACACCCGGAGTGTTGTAAGCACCAATTTTAGTGTTGT |
| | CAGGCCTGCTAGTCAGCCACAGTTTGGGGAAAGCTGTGCAGCCTGTAACCCCCCCAGGAGAAGCTGG |
| | GAAACCAAGCTCATAGTCAGGCCGAGAACGCCATGGCACGGAAGAAGCCATGCTGCCTGTGAGCCCC |
| | TCAGAGGACACTGAGTCAAAAAACCCCACGCGCTTGGAAGCGCAGGATGGGAAAAGAAGGTGGCGAC |
| | CTTCCCCACCCTTCAATCTGGGGCCTGAACTGGAGACTAGCTGTGAATCTCCAGCAGAGGGACTAGT |
| | GGTTAGAGGAGACCCCCCGGAAAACGCAAAACAGCATATTGACGTGGGAAAGACCAGAGACTCCATG |
| | AGTTTCCACCACGCTGGCCGCCAGGCACAGATCGCCGAACTTCGGCGGCCGGTGTGGGGAAATCCAT |
| | GGTTTCT |
| 298 | GenBank Accession No. KJ776791.2 (Zika virus strain H/PF/2013, complete |
| | genome) |
| | AGTTGTTGATCTGTGTGAATCAGACTGCGACAGTTCGAGTTTGAAGCGAAAGCTAGCAACAGTATCA |
| | ACAGGTTTTATTTTGGATTTGGAAACGAGAGTTTCTGGTCATGAAAAACCCAAAAAAGAAATCCGGA |
| | GGATTCCGGATTGTCAATATGCTAAAACGCGGAGTAGCCCGTGTGAGCCCCTTTGGGGGCTTGAAGA |
| | GGCTGCCAGCCGGACTTCTGCTGGGTCATGGGCCCATCAGGATGGTCTTGGCGATTCTAGCCTTTTT |
| | GAGATTCACGGCAATCAAGCCATCACTGGGTCTCATCAATAGATGGGGTTCAGTGGGGAAAAAAGAG |
| | GCTATGGAAATAATAAAGAAGTTCAAGAAAGATCTGGCTGCCATGCTGAGAATAATCAATGCTAGGA |
| | AGGAGAAGAAGAGACGAGGCGCAGATACTAGTGTCGGAATTGTTGGCCTCCTGCTGACCACAGCTAT |
| | GGCAGCGGAGGTCACTAGACGTGGGAGTGCATACTATATGTACTTGGACAGAAACGACGCTGGGGAG |
| | GCCATATCTTTTCCAACCACATTGGGGATGAATAAGTGTTATATACAGATCATGGATCTTGGACACA |
| | TGTGTGATGCCACCATGAGCTATGAATGCCCTATGCTGGATGAGGGGGTGGAACCAGATGACGTCGA |
| | TTGTTGGTGCAACACGACGTCAACTTGGGTTGTGTACGGAACCTGCCATCACAAAAAAGGTGAAGCA |
| | CGGAGATCTAGAAGAGCTGTGACGCTCCCCTCCCATTCCACTAGGAAGCTGCAAACGCGGTCGCAAA |
| | CCTGGTTGGAATCAAGAGAATACACAAAGCACTTGATTAGAGTCGAAAATTGGATATTCAGGAACCC |
| | TGGCTTCGCGTTAGCAGCAGCTGCCATCGCTTGGCTTTTGGGAAGCTCAACGAGCCAAAAAGTCATA |
| | TACTTGGTCATGATACTGCTGATTGCCCCGGCATACAGCATCAGGTGCATAGGAGTCAGCAATAGGG |
| | ACTTTGTGGAAGGTATGTCAGGTGGGACTTGGGTTGATGTTGTCTTGGAACATGGAGGTTGTGTCAC |
| | CGTAATGGCACAGGACAAACCGACTGTCGACATAGAGCTGGTTACAACAACAGTCAGCAACATGGCG |
| | GAGGTAAGATCCTACTGCTATGAGGCATCAATATCGGACATGGCTTCGGACAGCCGCTGCCCAACAC |
| | AAGGTGAAGCCTACCTTGACAAGCAATCAGACACTCAATATGTCTGCAAAAGAACGTTAGTGGACAG |
| | AGGCTGGGGAAATGGATGTGGACTTTTTGGCAAAGGGAGCCTGGTGACATGCGCTAAGTTTGCATGC |
| | TCCAAGAAAATGACCGGGAAGAGCATCCAGCCAGAGAATCTGGAGTACCGGATAATGCTGTCAGTTC |
| | ATGGCTCCCAGCACAGTGGGATGATCGTTAATGACACAGGACATGAAACTGATGAGAATAGAGCGAA |
| | GGTTGAGATAACGCCCAATTCACCAAGAGCCGAAGCCACCCTGGGGGGTTTTGGAAGCCTAGGACTT |
| | GATTGTGAACCGAGGACAGGCCTTGACTTTTCAGATTTGTATTACTTGACTATGAATAACAAGCACT |
| | GGTTGGTTCACAAGGAGTGGTTCCACGACATTCCATTACCTTGGCACGCTGGGGCAGACACCGGAAC |
| | TCCACACTGGAACAACAAAGAAGCACTGGTAGAGTTCAAGGACGCACATGCCAAAAGGCAAACTGTC |
| | GTGGTTCTAGGGAGTCAAGAAGGAGCAGTTCACACGGCCCTTGCTGGAGCTCTGGAGGCTGAGATGG |
| | ATGGTGCAAAGGGAAGGCTGTCCTCTGGCCACTTGAAATGTCGCCTGAAAATGGATAAACTTAGATT |
| | GAAGGGCGTGTCATACTCCTTGTGTACCGCAGCGTTCACATTCACCAAGATCCCGGCTGAAACACTG |
| | CACGGGACAGTCACAGTGGAGGTACAGTACGCAGGGACAGATGGACCTTGCAAGGTTCCAGCTCAGA |
| | TGGCGGTGGACATGCAAACTCTGACCCCAGTTGGGAGGTTGATAACCGCTAACCCCGTAATCACTGA |
| | AAGCACTGAGAACTCTAAGATGATGCTGGAACTTGATCCACCATTTGGGGACTCTTACATTGTCATA |
| | GGAGTCGGGGAGAAGAAGATCACCCACCACTGGCACAGGAGTGGCAGCACCATTGGAAAAGCATTTG |
| | AAGCCACTGTGAGAGGTGCCAAGAGAATGGCAGTCTTGGGAGACACAGCCTGGGACTTTGGATCAGT |
| | TGGAGGCGCTCTCAACTCATTGGGCAAGGGCATCCATCAAATTTTTGGAGCAGCTTTCAAATCATTG |
| | TTTGGAGGAATGTCCTGGTTCTCACAAATTCTCATTGGAACGTTGCTGATGTGGTTGGGTCTGAACA |
| | CAAAGAATGGATCTATTTCCCTTATGTGCTTGGCCTTAGGGGGAGTGTTGATCTTCTTATCCACAGC |
| | TGTCTCTGCTGATGTGGGGTGCTCGGTGGACTTCTCAAAGAAGGAGACGAGATGCGGTACAGGGGTG |
| | TTCGTCTATAACGACGTTGAAGCCTGGAGGGACAGGTACAAGTACCATCCTGACTCCCCCCGTAGAT |
| | TGGCAGCAGCAGTCAAGCAAGCCTGGGAAGATGGTATCTGTGGGATCTCCTCTGTTTCAAGAATGGA |
| | AAACATCATGTGGAGATCAGTAGAAGGGGAGCTCAACGCAATCCTGGAAGAGAATGGAGTTCAACTG |
| | ACGGTCGTTGTGGGATCTGTAAAAAACCCCATGTGGAGAGGTCCACAGAGATTGCCCGTGCCTGTGA |
| | ACGAGCTGCCCCACGGCTGGAAGGCTTGGGGGAAATCGTACTTCGTCAGAGCAGCAAAGACAAATAA |
| | CAGCTTTGTCGTGGATGGTGACACACTGAAGGAATGCCCACTCAAACATAGAGCATGGAACAGCTTT |
| | CTTGTGGAGGATCATGGGTTCGGGGTATTTCACACTAGTGTCTGGCTCAAGGTTAGAGAAGATTATT |
| | CATTAGAGTGTGATCCAGCCGTTATTGGAACAGCTGTTAAGGGAAAGGAGGCTGTACACAGTGATCT |
| | AGGCTACTGGATTGAGAGTGAGAAGAATGACACATGGAGGCTGAAGAGGGCCCATCTGATCGAGATG |
| | AAAACATGTGAATGGCCAAAGTCCCACACATTGTGGACAGATGGAATAGAAGAGAGTGATCTGATCA |
| | TACCCAAGTCTTTAGCTGGGCCACTCAGCCATCACAATACCAGAGAGGGCTACAGGACCCAAATGAA |
| | AGGGCCATGGCACAGTGAAGAGCTTGAAATTCGGTTTGAGGAATGCCCAGGCACTAAGGTCCACGTG |
| | GAGGAAACATGTGGAACAAGAGGACCATCTCTGAGATCAACCACTGCAAGCGGAAGGGTGATCGAGG |
| | AATGGTGCTGCAGGGAGTGCACAATGCCCCCACTGTCGTTCCGGGCTAAAGATGGCTGTTGGTATGG |
| | AATGGAGATAAGGCCCAGGAAAGAACCAGAAAGTAACTTAGTAAGGTCAATGGTGACTGCAGGATCA |
| | ACTGATCACATGGATCACTTCTCCCTTGGAGTGCTTGTGATTCTGCTCATGGTGCAGGAAGGGCTGA |
| | AGAAGAGAATGACCACAAAGATCATCATAAGCACATCGATGGCAGTGCTGGTAGCTATGATCCTGGG |
| | AGGATTTTCAATGAGTGACCTGGCTAAGCTTGCAATTTTGATGGGTGCCACCTTCGCGGAAATGAAC |
| | ACTGGAGGAGATGTAGCTCATCTGGCGCTGATAGCGGCATTCAAAGTCAGACCAGCGTTGCTGGTAT |
| | CTTTCATCTTCAGAGCTAATTGGACACCCCGTGAAAGCATGCTGCTGGCCTTGGCCTCGTGTCTTTT |
| | GCAAACTGCGATCTCCGCCTTGGAAGGCGACCTGATGGTTCTCATCAATGGTTTTGCTTTGGCCTGG |
| | TTGGCAATACGAGCGATGGTTGTTCCACGCACTGATAACATCACCTTGGCAATCCTGGCTGCTCTGA |
| | CACCACTGGCCCGGGGCACACTGCTTGTGGCGTGGAGAGCAGGCCTTGCTACTTGCGGGGGGTTTAT |
| | GCTCCTCTCTCTGAAGGGAAAAGGCAGTGTGAAGAAGAACTTACCATTTGTCATGGCCCTGGGACTA |
| | ACCGCTGTGAGGCTGGTCGACCCCATCAACGTGGTGGGACTGCTGTTGCTCACAAGGAGTGGGAAGC |
| | GGAGCTGGCCCCCTAGCGAAGTACTCACAGCTGTTGGCCTGATATGCGCATTGGCTGGAGGGTTCGC |
| | CAAGGCAGATATAGAGATGGCTGGGCCCATGGCCGCGGTCGGTCTGCTAATTGTCAGTTACGTGGTC |
| | TCAGGAAAGAGTGTGGAGATGTACATTGAAAGAGCAGGTGACATCACATGGGAAAAAGATGCGGAAG |
| | TCACTGGAAACAGTCCCCGGCTCGATGTGGCGCTAGATGAGAGTGGTGATTTCTCCCTGGTGGAGGA |
| | TGACGGTCCCCCCATGAGAGAGATCATACTCAAGGTGGTCCTGATGACCATCTGTGGCATGAACCCA |
| | ATAGCCATACCCTTTGCAGCTGGAGCGTGGTACGTATACGTGAAGACTGGAAAAAGGAGTGGTGCTC |
| | TATGGGATGTGCCTGCTCCCAAGGAAGTAAAAAAGGGGGAGACCACAGATGGAGTGTACAGAGTAAT |
| | GACTCGTAGACTGCTAGGTTCAACACAAGTTGGAGTGGGAGTTATGCAAGAGGGGGTCTTTCACACT |
| | ATGTGGCACGTCACAAAAGGATCCGCGCTGAGAAGCGGTGAAGGGAGACTTGATCCATACTGGGGAG |
| | ATGTCAAGCAGGATCTGGTGTCATACTGTGGTCCATGGAAGCTAGATGCCGCCTGGGACGGGCACAG |
| | CGAGGTGCAGCTCTTGGCCGTGCCCCCCGGAGAGAGAGCGAGGAACATCCAGACTCTGCCCGGAATA |
| | TTTAAGACAAAGGATGGGGACATTGGAGCGGTTGCGCTGGATTACCCAGCAGGAACTTCAGGATCTC |
| | CAATCCTAGACAAGTGTGGGAGAGTGATAGGACTTTATGGCAATGGGGTCGTGATCAAAAATGGGAG |
| | TTATGTTAGTGCCATCACCCAAGGGAGGAGGGAGGAAGAGACTCCTGTTGAGTGCTTCGAGCCTTCG |
| | ATGCTGAAGAAGAAGCAGCTAACTGTCTTAGACTTGCATCCTGGAGCTGGGAAAACCAGGAGAGTTC |
| | TTCCTGAAATAGTCCGTGAAGCCATAAAAACAAGACTCCGTACTGTGATCTTAGCTCCAACCAGGGT |
| | TGTCGCTGCTGAAATGGAGGAAGCCCTTAGAGGGCTTCCAGTGCGTTATATGACAACAGCAGTCAAT |
| | GTCACCCACTCTGGAACAGAAATCGTCGACTTAATGTGCCATGCCACCTTCACTTCACGTCTACTAC |
| | AGCCAATCAGAGTCCCCAACTATAATCTGTATATTATGGATGAGGCCCACTTCACAGATCCCTCAAG |
| | TATAGCAGCAAGAGGATACATTTCAACAAGGGTTGAGATGGGCGAGGCGGCTGCCATCTTCATGACC |
| | GCCACGCCACCAGGAACCCGTGACGCATTTCCGGACTCCAACTCACCAATTATGGACACCGAAGTGG |
| | AAGTCCCAGAGAGAGCCTGGAGCTCAGGCTTTGATTGGGTGACGGATCATTCTGGAAAAACAGTTTG |
| | GTTTGTTCCAAGCGTGAGGAACGGCAATGAGATCGCAGCTTGTCTGACAAAGGCTGGAAAACGGGTC |
| | ATACAGCTCAGCAGAAAGACTTTTGAGACAGAGTTCCAGAAAACAAAACATCAAGAGTGGGACTTTG |
| | TCGTGACAACTGACATTTCAGAGATGGGCGCCAACTTTAAAGCTGACCGTGTCATAGATTCCAGGAG |
| | ATGCCTAAAGCCGGTCATACTTGATGGCGAGAGAGTCATTCTGGCTGGACCCATGCCTGTCACACAT |
| | GCCAGCGCTGCCCAGAGGAGGGGGCGCATAGGCAGGAATCCCAACAAACCTGGAGATGAGTATCTGT |
| | ATGGAGGTGGGTGCGCAGAGACTGACGAAGACCATGCACACTGGCTTGAAGCAAGAATGCTCCTTGA |
| | CAATATTTACCTCCAAGATGGCCTCATAGCCTCGCTCTATCGACCTGAGGCCGACAAAGTAGCAGCC |
| | ATTGAGGGAGAGTTCAAGCTTAGGACGGAGCAAAGGAAGACCTTTGTGGAACTCATGAAAAGAGGAG |
| | ATCTTCCTGTTTGGCTGGCCTATCAGGTTGCATCTGCCGGAATAACCTACACAGATAGAAGATGGTG |
| | CTTTGATGGCACGACCAACAACACCATAATGGAAGACAGTGTGCCGGCAGAGGTGTGGACCAGACAC |
| | GGAGAGAAAAGAGTGCTCAAACCGAGGTGGATGGACGCCAGAGTTTGTTCAGATCATGCGGCCCTGA |
| | AGTCATTCAAGGAGTTTGCCGCTGGGAAAAGAGGAGCGGCTTTTGGAGTGATGGAAGCCCTGGGAAC |
| | ACTGCCAGGACACATGACAGAGAGATTCCAGGAAGCCATTGACAACCTCGCTGTGCTCATGCGGGCA |
| | GAGACTGGAAGCAGGCCTTACAAAGCCGCGGCGGCCCAATTGCCGGAGACCCTAGAGACCATTATGC |
| | TTTTGGGGTTGCTGGGAACAGTCTCGCTGGGAATCTTTTTCGTCTTGATGAGGAACAAGGGCATAGG |
| | GAAGATGGGCTTTGGAATGGTGACTCTTGGGGCCAGCGCATGGCTCATGTGGCTCTCGGAAATTGAG |
| | CCAGCCAGAATTGCATGTGTCCTCATTGTTGTGTTCCTATTGCTGGTGGTGCTCATACCTGAGCCAG |
| | AAAAGCAAAGATCTCCCCAGGACAACCAAATGGCAATCATCATCATGGTAGCAGTAGGTCTTCTGGG |
| | CTTGATTACCGCCAATGAACTCGGATGGTTGGAGAGAACAAAGAGTGACCTAAGCCATCTAATGGGA |
| | AGGAGAGAGGAGGGGGCAACCATAGGATTCTCAATGGACATTGACCTGCGGCCAGCCTCAGCTTGGG |
| | CCATCTATGCTGCCTTGACAACTTTCATTACCCCAGCCGTCCAACATGCAGTGACCACTTCATACAA |
| | CAACTACTCCTTAATGGCGATGGCCACGCAAGCTGGAGTGTTGTTTGGTATGGGCAAAGGGATGCCA |
| | TTCTACGCATGGGACTTTGGAGTCCCGCTGCTAATGATAGGTTGCTACTCACAATTAACACCCCTGA |
| | CCCTAATAGTGGCCATCATTTTGCTCGTGGCGCACTACATGTACTTGATCCCAGGGCTGCAGGCAGC |
| | AGCTGCGCGTGCTGCCCAGAAGAGAACGGCAGCTGGCATCATGAAGAACCCTGTTGTGGATGGAATA |
| | GTGGTGACTGACATTGACACAATGACAATTGACCCCCAAGTGGAGAAAAAGATGGGACAGGTGCTAC |
| | TCATAGCAGTAGCCGTCTCCAGCGCCATACTGTCGCGGACCGCCTGGGGGTGGGGGGAGGCTGGGGC |
| | CCTGATCACAGCGGCAACTTCCACTTTGTGGGAAGGCTCTCCGAACAAGTACTGGAACTCCTCTACA |
| | GCCACTTCACTGTGTAACATTTTTAGGGGAAGTTACTTGGCTGGAGCTTCTCTAATCTACACAGTAA |
| | CAAGAAACGCTGGCTTGGTCAAGAGACGTGGGGGTGGAACAGGAGAGACCCTGGGAGAGAAATGGAA |
| | GGCCCGCTTGAACCAGATGTCGGCCCTGGAGTTCTACTCCTACAAAAAGTCAGGCATCACCGAGGTG |
| | TGCAGAGAAGAGGCCCGCCGCGCCCTCAAGGACGGTGTGGCAACGGGAGGCCATGCTGTGTCCCGAG |
| | GAAGTGCAAAGCTGAGATGGTTGGTGGAGCGGGGATACCTGCAGCCCTATGGAAAGGTCATTGATCT |
| | TGGATGTGGCAGAGGGGGCTGGAGTTACTACGCCGCCACCATCCGCAAAGTTCAAGAAGTGAAAGGA |
| | TACACAAAAGGAGGCCCTGGTCATGAAGAACCCATGTTGGTGCAAAGCTATGGGTGGAACATAGTCC |
| | GTCTTAAGAGTGGGGTGGACGTCTTTCATATGGCGGCTGAGCCGTGTGACACGTTGCTGTGTGACAT |
| | AGGTGAGTCATCATCTAGTCCTGAAGTGGAAGAAGCACGGACGCTCAGAGTCCTCTCCATGGTGGGG |
| | GATTGGCTTGAAAAAAGACCAGGAGCCTTTTGTATAAAAGTGTTGTGCCCATACACCAGCACTATGA |
| | TGGAAACCCTGGAGCGACTGCAGCGTAGGTATGGGGGAGGACTGGTCAGAGTGCCACTCTCCCGCAA |
| | CTCTACACATGAGATGTACTGGGTCTCTGGAGCGAAAAGCAACACCATAAAAAGTGTGTCCACCACG |
| | AGCCAGCTCCTCTTGGGGCGCATGGACGGGCCCAGGAGGCCAGTGAAATATGAGGAGGATGTGAATC |
| | TCGGCTCTGGCACGCGGGCTGTGGTAAGCTGCGCTGAAGCTCCCAACATGAAGATCATTGGTAACCG |
| | CATTGAAAGGATCCGCAGTGAGCACGCGGAAACGTGGTTCTTTGACGAGAACCACCCATATAGGACA |
| | TGGGCTTACCATGGAAGCTATGAGGCCCCCACACAAGGGTCAGCGTCCTCTCTAATAAACGGGGTTG |
| | TCAGGCTCCTGTCAAAACCCTGGGATGTGGTGACTGGAGTCACAGGAATAGCCATGACCGACACCAC |
| | ACCGTATGGTCAGCAAAGAGTTTTCAAGGAAAAAGTGGACACTAGGGTGCCAGACCCCCAAGAAGGC |
| | ACTCGTCAGGTTATGAGCATGGTCTCTTCCTGGTTGTGGAAAGAGCTAGGCAAACACAAACGGCCAC |
| | GAGTCTGTACCAAAGAAGAGTTCATCAACAAGGTTCGTAGCAATGCAGCATTAGGGGCAATATTTGA |
| | AGAGGAAAAAGAGTGGAAGACTGCAGTGGAAGCTGTGAAGGATCCAAGGTTCTGGGCTCTAGTGGAC |
| | AAGGAAAGAGAGCACCACCTGAGAGGAGAGTGCCAGAGTTGTGTGTACAACATGATGGGAAAAAGAG |
| | AAAAGAAACAAGGGGAATTTGGAAAGGCCAAGGGCAGCCGCGCCATCTGGTATATGTGGCTAGGGGC |
| | TAGATTTCTAGAGTTCGAAGCCCTTGGATTCTTGAACGAGGATCACTGGATGGGGAGAGAGAACTCA |
| | GGAGGTGGTGTTGAAGGGCTGGGATTACAAAGACTCGGATATGTCCTAGAAGAGATGAGTCGCATAC |
| | CAGGAGGAAGGATGTATGCAGATGACACTGCTGGCTGGGACACCCGCATCAGCAGGTTTGATCTGGA |
| | GAATGAAGCTCTAATCACCAACCAAATGGAGAAAGGGCACAGGGCCTTGGCATTGGCCATAATCAAG |
| | TACACATACCAAAACAAAGTGGTAAAGGTCCTTAGACCAGCTGAAAAAGGGAAGACAGTTATGGACA |
| | TTATTTCGAGACAAGACCAAAGGGGGAGCGGACAAGTTGTCACTTACGCTCTTAACACATTTACCAA |
| | CCTAGTGGTGCAACTCATTCGGAATATGGAGGCTGAGGAAGTTCTAGAGATGCAAGACTTGTGGCTG |
| | CTGCGGAGGTCAGAGAAAGTGACCAACTGGTTGCAGAGCAACGGATGGGATAGGCTCAAACGAATGG |
| | CAGTCAGTGGAGATGATTGCGTTGTGAAGCCAATTGATGATAGGTTTGCACATGCCCTCAGGTTCTT |
| | GAATGATATGGGAAAAGTTAGGAAGGACACACAAGAGTGGAAACCCTCAACTGGATGGGACAACTGG |
| | GAAGAAGTTCCGTTTTGCTCCCACCACTTCAACAAGCTCCATCTCAAGGACGGGAGGTCCATTGTGG |
| | TTCCCTGCCGCCACCAAGATGAACTGATTGGCCGGGCCCGCGTCTCTCCAGGGGCGGGATGGAGCAT |
| | CCGGGAGACTGCTTGCCTAGCAAAATCATATGCGCAAATGTGGCAGCTCCTTTATTTCCACAGAAGG |
| | GACCTCCGACTGATGGCCAATGCCATTTGTTCATCTGTGCCAGTTGACTGGGTTCCAACTGGGAGAA |
| | CTACCTGGTCAATCCATGGAAAGGGAGAATGGATGACCACTGAAGACATGCTTGTGGTGTGGAACAG |
| | AGTGTGGATTGAGGAGAACGACCACATGGAAGACAAGACCCCAGTTACGAAATGGACAGACATTCCC |
| | TATTTGGGAAAAAGGGAAGACTTGTGGTGTGGATCTCTCATAGGGCACAGACCGCGCACCACCTGGG |
| | CTGAGAACATTAAAAACACAGTCAACATGGTGCGCAGGATCATAGGTGATGAAGAAAAGTACATGGA |
| | CTACCTATCCACCCAAGTTCGCTACTTGGGTGAAGAAGGGTCTACACCTGGAGTGCTGTAAGCACCA |
| | ATCTTAGTGTTGTCAGGCCTGCTAGTCAGCCACAGCTTGGGGAAAGCTGTGCAGCCTGTGACCCCCC |
| | CAGGAGAAGCTGGGAAACCAAGCCTATAGTCAGGCCGAGAACGCCATGGCACGGAAGAAGCCATGCT |
| | GCCTGTGAGCCCCTCAGAGGACACTGAGTCAAAAAACCCCACGCGCTTGGAGGCGCAGGATGGGAAA |
| | AGAAGGTGGCGACCTTCCCCACCCTTCAATCTGGGGCCTGAACTGGAGATCAGCTGTGGATCTCCAG |
| | AAGAGGGACTAGTGGTTAGAGGAGACCCCCCGGAAAACGCAAAACAGCATATTGACGCTGGGAAAGA |
| | CCAGAGACTCCATGAGTTTCCACCACGCTGGCCGCCAGGCACAGATCGCCGAATAGCGGCGGCCGGT |
| | GTGGGGAAATCCATGGGTCT |
| 299 | GenBank Accession No. KX377337.1 (Zika virus strain PRVABC-59, complete |
| | genome) |
| | AGTTGTTGATCTGTGTGAATCAGACTGCGACAGTTCGAGTTTGAAGCGAAAGCTAGCAACAGTATCA |
| | ACAGGTTTTATTTTGGATTTGGAAACGAGAGTTTCTGGTCATGAAAAACCCAAAAAAGAAATCCGGA |
| | GGATTCCGGATTGTCAATATGCTAAAACGCGGAGTAGCCCGTGTGAGCCCCTTTGGGGGCTTGAAGA |
| | GGCTGCCAGCCGGACTTCTGCTGGGTCATGGGCCCATCAGGATGGTCTTGGCGATTCTAGCCTTTTT |
| | GAGATTCACGGCAATCAAGCCATCACTGGGTCTCATCAATAGATGGGGTTCAGTGGGGAAAAAAGAG |
| | GCTATGGAAACAATAAAGAAGTTCAAGAAAGATCTGGCTGCCATGCTGAGAATAATCAATGCTAGGA |
| | AGGAGAAGAAGAGACGAGGCGCAGATACTAGTGTCGGAATTGTTGGCCTCCTGCTGACCACAGCTAT |
| | GGCAGCGGAGGTCACTAGACGTGGGAGTGCATACTATATGTACTTGGACAGAAACGATGCTGGGGAG |
| | GCCATATCTTTTCCAACCACATTGGGGATGAATAAGTGTTATATACAGATCATGGATCTTGGACACA |
| | TGTGTGATGCCACCATGAGCTATGAATGCCCTATGCTGGATGAGGGGGTGGAACCAGATGACGTCGA |
| | TTGTTGGTGCAACACGACGTCAACTTGGGTTGTGTACGGAACCTGCCATCACAAAAAAGGTGAAGCA |
| | CGGAGATCTAGAAGAGCTGTGACGCTCCCCTCCCATTCCACCAGGAAGCTGCAAACGCGGTCGCAAA |
| | CCTGGTTGGAATCAAGAGAATACACAAAGCACTTGATTAGAGTCGAAAATTGGATATTCAGGAACCC |
| | TGGCTTCGCGTTAGCAGCAGCTGCCATCGCTTGGCTTTTGGGAAGCTCAACGAGCCAAAAAGTCATA |
| | TACTTGGTCATGATACTGCTGATTGCCCCGGCATACAGCATCAGGTGCATAGGAGTCAGCAATAGGG |
| | ACTTTGTGGAAGGTATGTCAGGTGGGACTTGGGTTGATGTTGTCTTGGAACATGGAGGTTGTGTCAC |
| | CGTAATGGCACAGGACAAACCGACTGTCGACATAGAGCTGGTTACAACAACAGTCAGCAACATGGCG |
| | GAGGTAAGATCCTACTGCTATGAGGCATCAATATCAGACATGGCTTCTGACAGCCGCTGCCCAACAC |
| | AAGGTGAAGCCTACCTTGACAAGCAATCAGACACTCAATATGTCTGCAAAAGAACGTTAGTGGACAG |
| | AGGCTGGGGAAATGGATGTGGACTTTTTGGCAAAGGGAGCCTGGTGACATGCGCTAAGTTTGCATGC |
| | TCCAAGAAAATGACCGGGAAGAGCATCCAGCCAGAGAATCTGGAGTACCGGATAATGCTGTCAGTTC |
| | ATGGCTCCCAGCACAGTGGGATGATCGTTAATGACACAGGACATGAAACTGATGAGAATAGAGCGAA |
| | AGTTGAGATAACGCCCAATTCACCGAGAGCCGAAGCCACCCTGGGGGGTTTTGGAAGCCTAGGACTT |
| | GATTGTGAACCGAGGACAGGCCTTGACTTTTCAGATTTGTATTACTTGACTATGAATAACAAGCACT |
| | GGTTGGTTCACAAGGAGTGGTTCCACGACATTCCATTACCTTGGCACGCTGGGGCAGACACCGGAAC |
| | TCCACACTGGAACAACAAAGAAGCACTGGTAGAGTTCAAGGACGCACATGCCAAAAGGCAAACTGTC |
| | GTGGTTCTAGGGAGTCAAGAAGGAGCAGTTCACACGGCCCTTGCTGGAGCTCTGGAGGCTGAGATGG |
| | ATGGTGCAAAGGGAAGGCTGTCCTCTGGCCACTTGAAATGTCGCCTGAAAATGGATAAACTTAGATT |
| | GAAGGGCGTGTCATACTCCTTGTGTACTGCAGCGTTCACATTCACCAAGATCCCGGCTGAAACACTG |
| | CACGGGACAGTCACAGTGGAGGTACAGTACGCAGGGACAGATGGACCTTGCAAGGTTCCAGCTCAGA |
| | TGGCGGTGGACATGCAAACTCTGACCCCAGTTGGGAGGTTGATAACCGCTAACCCCGTAATCACTGA |
| | AAGCACTGAGAACTCTAAGATGATGCTGGAACTTGATCCACCATTTGGGGACTCTTACATTGTCATA |
| | GGAGTCGGGGAGAAGAAGATCACCCACCACTGGCACAGGAGTGGCAGCACCATTGGAAAAGCATTTG |
| | AAGCCACTGTGAGAGGTGCCAAGAGAATGGCAGTCTTGGGAGACACAGCCTGGGACTTTGGATCAGT |
| | TGGAGGCGCTCTCAACTCATTGGGCAAGGGCATCCATCAAATTTTTGGAGCAGCTTTCAAATCATTG |
| | TTTGGAGGAATGTCCTGGTTCTCACAAATTCTCATTGGAACGTTGCTGATGTGGTTGGGTCTGAACA |
| | CAAAGAATGGATCTATTTCCCTTATGTGCTTGGCCTTAGGGGGAGTGTTGATCTTCTTATCCACAGC |
| | CGTCTCTGCTGATGTGGGGTGCTCGGTGGACTTCTCAAAGAAGGAGACGAGATGCGGTACAGGGGTG |
| | TTCGTCTATAACGACGTTGAAGCCTGGAGGGACAGGTACAAGTACCATCCTGACTCCCCCCGTAGAT |
| | TGGCAGCAGCAGTCAAGCAAGCCTGGGAAGATGGTATCTGCGGGATCTCCTCTGTTTCAAGAATGGA |
| | AAACATCATGTGGAGATCAGTAGAAGGGGAGCTCAACGCAATCCTGGAAGAGAATGGAGTTCAACTG |
| | ACGGTCGTTGTGGGATCTGTAAAAAACCCCATGGGGAGAGGTCCACAGAGATTGCCCGTGCCTGTGA |
| | ACGAGCTGCCCCACGGCTGGAAGGCTTGGGGGAAATCGTATTTCGTCAGAGCAGCAAAGACAAATAA |
| | CAGCTTTGTCGTGGATGGTGACACACTGAAGGAATGCCCACTCAAACATAGAGCATGGAACAGCTTT |
| | CTTGTGGAGGATCATGGGTTCGGGGTATTTCACACTAGTGTCTGGCTCAAGGTTAGAGAAGATTATT |
| | CATTAGAGTGTGATCCAGCCGTTATTGGAACAGCTGTTAAGGGAAAGGAGGCTGTACACAGTGATCT |
| | AGGCTACTGGATTGAGAGTGAGAAGAATGACACATGGAGGCTGAAGAGGGCCCATCTGATCGAGATG |
| | AAAACATGTGAATGGCCAAAGTCCCACACATTGTGGACAGATGGAATAGAAGAGAGTGATCTGATCA |
| | TACCCAAGTCTTTAGCTGGGCCACTCAGCCATCACAATACCAGAGAGGGCTACAGGACCCAAATGAA |
| | AGGGCCATGGCACAGTGAAGAGCTTGAAATTCGGTTTGAGGAATGCCCAGGCACTAAGGTCCACGTG |
| | GAGGAAACATGTGGAACAAGAGGACCATCTCTGAGATCAACCACTGCAAGCGGAAGGGTGATCGAGG |
| | AATGGTGCTGCAGGGAGTGCACAATGCCCCCACTGTCGTTCCGGGCTAAAGATGGCTGTTGGTATGG |
| | AATGGAGATAAGGCCCAGGAAAGAACCAGAAAGCAACTTAGTAAGGTCAATGGTGACTGCAGGATCA |
| | ACTGATCACATGGACCACTTCTCCCTTGGAGTGCTTGTGATCCTGCTCATGGTGCAGGAAGGGCTGA |
| | AGAAGAGAATGACCACAAAGATCATCATAAGCACATCAATGGCAGTGCTGGTAGCTATGATCCTGGG |
| | AGGATTTTCAATGAGTGACCTGGCTAAGCTTGCAATTTTGATGGGTGCCACCTTCGCGGAAATGAAC |
| | ACTGGAGGAGATGTAGCTCATCTGGCGCTGATAGCGGCATTCAAAGTCAGACCAGCGTTGCTGGTAT |
| | CTTTCATCTTCAGAGCTAATTGGACACCCCGTGAAAGCATGCTGCTGGCCTTGGCCTCGTGTCTTTT |
| | GCAAACTGCGATCTCCGCCTTGGAAGGCGACCTGATGGTTCTCATCAATGGTTTTGCTTTGGCCTGG |
| | TTGGCAATACGAGCGATGGTTGTTCCACGCACTGATAACATCACCTTGGCAATCCTGGCTGCTCTGA |
| | CACCACTGGCCCGGGGCACACTGCTTGTGGCGTGGAGAGCAGGCCTTGCTACTTGCGGGGGGTTTAT |
| | GCTCCTCTCTCTGAAGGGAAAAGGCAGTGTGAAGAAGAACTTACCATTTGTCATGGCCCTGGGACTA |
| | ACCGCTGTGAGGCTGGTCGACCCCATCAACGTGGTGGGACTGCTGTTGCTCACAAGGAGTGGGAAGC |
| | GGAGCTGGCCCCCTAGCGAAGTACTCACAGCTGTTGGCCTGATATGCGCATTGGCTGGAGGGTTCGC |
| | CAAGGCAGATATAGAGATGGCTGGGCCCATGGCCGCGGTCGGTCTGCTAATTGTCAGTTACGTGGTC |
| | TCAGGAAAGAGTGTGGAGATGTACATTGAAAGAGCAGGTGACATCACATGGGAAAAAGATGCGGAAG |
| | TCACTGGAAACAGTCCCCGGCTCGATGTGGCGCTAGATGAGAGTGGTGATTTCTCCCTGGTGGAGGA |
| | TGACGGTCCCCCCATGAGAGAGATCATACTCAAGGTGGTCCTGATGACCATCTGTGGCATGAACCCA |
| | ATAGCCATACCCTTTGCAGCTGGAGCGTGGTACGTATACGTGAAGACTGGAAAAAGGAGTGGTGCTC |
| | TATGGGATGTGCCTGCTCCCAAGGAAGTAAAAAAGGGGGAGACCACAGATGGAGTGTACAGAGTAAT |
| | GACTCGTAGACTGCTAGGTTCAACACAAGTTGGAGTGGGAGTTATGCAAGAGGGGGTCTTTCACACT |
| | ATGTGGCACGTCACAAAAGGATCCGCGCTGAGAAGCGGTGAAGGGAGACTTGATCCATACTGGGGAG |
| | ATGTCAAGCAGGATCTGGTGTCATACTGTGGTCCATGGAAGCTAGATGCCGCCTGGGATGGGCACAG |
| | CGAGGTGCAGCTCTTGGCCGTGCCCCCCGGAGAGAGAGCGAGGAACATCCAGACTCTGCCCGGAATA |
| | TTTAAGACAAAGGATGGGGACATTGGAGCGGTTGCGCTGGATTACCCAGCAGGAACTTCAGGATCTC |
| | CAATCCTAGACAAGTGTGGGAGAGTGATAGGACTTTATGGCAATGGGGTCGTGATCAAAAACGGGAG |
| | TTATGTTAGTGCCATCACCCAAGGGAGGAGGGAGGAAGAGACTCCTGTTGAGTGCTTCGAGCCCTCG |
| | ATGCTGAAGAAGAAGCAGCTAACTGTCTTAGACTTGCATCCTGGAGCTGGGAAAACCAGGAGAGTTC |
| | TTCCTGAAATAGTCCGTGAAGCCATAAAAACAAGACTCCGTACTGTGATCTTAGCTCCAACCAGGGT |
| | TGTCGCTGCTGAAATGGAGGAGGCCCTTAGAGGGCTTCCAGTGCGTTATATGACAACAGCAGTCAAT |
| | GTCACCCACTCTGGAACAGAAATCGTCGACTTAATGTGCCATGCCACCTTCACTTCACGTCTACTAC |
| | AGCCAATCAGAGTCCCCAACTATAATCTGTATATTATGGATGAGGCCCACTTCACAGATCCCTCAAG |
| | TATAGCAGCAAGAGGATACATTTCAACAAGGGTTGAGATGGGCGAGGCGGCTGCCATCTTCATGACC |
| | GCCACGCCACCAGGAACCCGTGACGCATTTCCGGACTCCAACTCACCAATTATGGACACCGAAGTGG |
| | AAGTCCCAGAGAGAGCCTGGAGCTCAGGCTTTGATTGGGTGACGGATCATTCTGGAAAAACAGTTTG |
| | GTTTGTTCCAAGCGTGAGGAACGGCAATGAGATCGCAGCTTGTCTGACAAAGGCTGGAAAACGGGTC |
| | ATACAGCTCAGCAGAAAGACTTTTGAGACAGAGTTCCAGAAAACAAAACATCAAGAGTGGGACTTTG |
| | TCGTGACAACTGACATTTCAGAGATGGGCGCCAACTTTAAAGCTGACCGTGTCATAGATTCCAGGAG |
| | ATGCCTAAAGCCGGTCATACTTGATGGCGAGAGAGTCATTCTGGCTGGACCCATGCCTGTCACACAT |
| | GCCAGCGCTGCCCAGAGGAGGGGGCGCATAGGCAGGAATCCCAACAAACCTGGAGATGAGTATCTGT |
| | ATGGAGGTGGGTGCGCAGAGACTGACGAAGACCATGCACACTGGCTTGAAGCAAGAATGCTCCTTGA |
| | CAATATTTACCTCCAAGATGGCCTCATAGCCTCGCTCTATCGACCTGAGGCCGACAAAGTAGCAGCC |
| | ATTGAGGGAGAGTTCAAGCTTAGGACGGAGCAAAGGAAGACCTTTGTGGAACTCATGAAAAGAGGAG |
| | ATCTTCCTGTTTGGCTGGCCTATCAGGTTGCATCTGCCGGAATAACCTACACAGATAGAAGATGGTG |
| | CTTTGATGGCACGACCAACAACACCATAATGGAAGACAGTGTGCCGGCAGAGGTGTGGACCAGACAC |
| | GGAGAGAAAAGAGTGCTCAAACCGAGGTGGATGGACGCCAGAGTTTGTTCAGATCATGCGGCCCTGA |
| | AGTCATTCAAGGAGTTTGCCGCTGGGAAAAGAGGAGCGGCTTTTGGAGTGATGGAAGCCCTGGGAAC |
| | ACTGCCAGGACACATGACAGAGAGATTCCAGGAAGCCATTGACAACCTCGCTGTGCTCATGCGGGCA |
| | GAGACTGGAAGCAGGCCTTACAAAGCCGCGGCGGCCCAATTGCCGGAGACCCTAGAGACCATAATGC |
| | TTTTGGGGTTGCTGGGAACAGTCTCGCTGGGAATCTTCTTCGTCTTGATGAGGAACAAGGGCATAGG |
| | GAAGATGGGCTTTGGAATGGTGACTCTTGGGGCCAGCGCATGGCTCATGTGGCTCTCGGAAATTGAG |
| | CCAGCCAGAATTGCATGTGTCCTCATTGTTGTGTTCCTATTGCTGGTGGTGCTCATACCTGAGCCAG |
| | AAAAGCAAAGATCTCCCCAGGACAACCAAATGGCAATCATCATCATGGTAGCAGTAGGTCTTCTGGG |
| | CTTGATTACCGCCAATGAACTCGGATGGTTGGAGAGAACAAAGAGTGACCTAAGCCATCTAATGGGA |
| | AGGAGAGAGGAGGGGGCAACCATAGGATTCTCAATGGACATTGACCTGCGGCCAGCCTCAGCTTGGG |
| | CCATCTATGCTGCCTTGACAACTTTCATTACCCCAGCCGTCCAACATGCAGTGACCACCTCATACAA |
| | CAACTACTCCTTAATGGCGATGGCCACGCAAGCTGGAGTGTTGTTTGGCATGGGCAAAGGGATGCCA |
| | TTCTACGCATGGGACTTTGGAGTCCCGCTGCTAATGATAGGTTGCTACTCACAATTAACACCCCTGA |
| | CCCTAATAGTGGCCATCATTTTGCTCGTGGCGCACTACATGTACTTGATCCCAGGGCTGCAGGCAGC |
| | AGCTGCGCGTGCTGCCCAGAAGAGAACGGCAGCTGGCATCATGAAGAACCCTGTTGTGGATGGAATA |
| | GTGGTGACTGACATTGACACAATGACAATTGACCCCCAAGTGGAGAAAAAGATGGGACAGGTGCTAC |
| | TCATAGCAGTAGCCGTCTCCAGCGCCATACTGTCGCGGACCGCCTGGGGGTGGGGGGAGGCTGGGGC |
| | TCTGATCACAGCCGCAACTTCCACTTTGTGGGAAGGCTCTCCGAACAAGTACTGGAACTCCTCTACA |
| | GCCACTTCACTGTGTAACATTTTTAGGGGAAGTTACTTGGCTGGAGCTTCTCTAATCTACACAGTAA |
| | CAAGAAACGCTGGCTTGGTCAAGAGACGTGGGGGTGGAACAGGAGAGACCCTGGGAGAGAAATGGAA |
| | GGCCCGCTTGAACCAGATGTCGGCCCTGGAGTTCTACTCCTACAAAAAGTCAGGCATCACCGAGGTG |
| | TGCAGAGAAGAGGCCCGCCGCGCCCTCAAGGACGGTGTGGCAACGGGAGGCCATGCTGTGTCCCGAG |
| | GAAGTGCAAAGCTGAGATGGTTGGTGGAGCGGGGATACCTGCAGCCCTATGGAAAGGTCATTGATCT |
| | TGGATGTGGCAGAGGGGGCTGGAGTTACTACGTCGCCACCATCCGCAAAGTTCAAGAAGTGAAAGGA |
| | TACACAAAAGGAGGCCCTGGTCATGAAGAACCCGTGTTGGTGCAAAGCTATGGGTGGAACATAGTCC |
| | GTCTTAAGAGTGGGGTGGACGTCTTTCATATGGCGGCTGAGCCGTGTGACACGTTGCTGTGTGACAT |
| | AGGTGAGTCATCATCTAGTCCTGAAGTGGAAGAAGCACGGACGCTCAGAGTCCTCTCCATGGTGGGG |
| | GATTGGCTTGAAAAAAGACCAGGAGCCTTTTGTATAAAAGTGTTGTGCCCATACACCAGCACTATGA |
| | TGGAAACCCTGGAGCGACTGCAGCGTAGGTATGGGGGAGGATTGGTCAGAGTGCCACTCTCCCGCAA |
| | CTCTACACATGAGATGTACTGGGTCTCTGGAGCGAAAAGCAACACCATAAAAAGTGTGTCCACCACG |
| | AGCCAGCTCCTCTTGGGGCGCATGGACGGGCCTAGGAGGCCAGTGAAATATGAGGAGGATGTGAATC |
| | TCGGCTCTGGCACGCGGGCTGTGGTAAGCTGCGCTGAAGCTCCCAACATGAAGATCATTGGTAACCG |
| | CATTGAAAGGATCCGCAGTGAGCACGCGGAAACGTGGTTCTTTGACGAGAACCACCCATATAGGACA |
| | TGGGCTTACCATGGAAGCTATGAGGCCCCCACACAAGGGTCAGCGTCCTCTCTAATAAACGGGGTTG |
| | TCAGGCTCCTGTCAAAACCCTGGGATGTGGTGACTGGAGTCACAGGAATAGCCATGACCGACACCAC |
| | ACCGTATGGTCAGCAAAGAGTTTTCAAGGAAAAAGTGGACACTAGGGTGCCAGACCCCCAAGAAGGC |
| | ACTCGTCAGGTTATGAGCATGGTCTCTTCCTGGTTGTGGAAAGAGCTAGGCAAACACAAACGGCCAC |
| | GAGTCTGCACCAAAGAAGAGTTCATCAACAAGGTTCGTAGCAATGCAGCATTAGGGGCAATATTTGA |
| | AGAGGAAAAAGAGTGGAAGACTGCAGTGGAAGCTGTGAAGGATCCAAGGTTCTGGGCTCTAGTGGAC |
| | AAGGAAAGAGAGCACCACCTGAGAGGAGAGTGCCAGAGCTGTGTGTACAACATGATGGGAAAAAGAG |
| | AAAAGAAACAAGGGGAATTTGGAAAGGCCAAGGGCAGCCGCGCCATCTGGTATATGTGGCTAGGGGC |
| | TAGATTTCTAGAGTTCGAAGCCCTTGGATTCTTGAACGAGGATCACTGGATGGGGAGAGAGAACTCA |
| | GGAGGTGGTGTTGAAGGGCTGGGATTACAAAGACTCGGATATGTCCTAGAAGAGATGAGTCGTATAC |
| | CAGGAGGAAGGATGTATGCAGATGACACTGCTGGCTGGGACACCCGCATTAGCAGGTTTGATCTGGA |
| | GAATGAAGCTCTAATCACCAACCAAATGGAGAAAGGGCACAGGGCCTTGGCATTGGCCATAATCAAG |
| | TACACATACCAAAACAAAGTGGTAAAGGTCCTTAGACCAGCTGAAAAAGGGAAAACAGTTATGGACA |
| | TTATTTCGAGACAAGACCAAAGGGGGAGCGGACAAGTTGTCACTTACGCTCTTAACACATTTACCAA |
| | CCTAGTGGTGCAACTCATTCGGAATATGGAGGCTGAGGAAGTTCTAGAGATGCAAGACTTGTGGCTG |
| | CTGCGGAGGTCAGAGAAAGTGACCAACTGGTTGCAGAGCAACGGATGGGATAGGCTCAAACGAATGG |
| | CAGTCAGTGGAGATGATTGCGTTGTGAAGCCAATTGATGATAGGTTTGCACATGCCCTCAGGTTCTT |
| | GAATGATATGGGAAAAGTTAGGAAGGACACACAAGAGTGGAAACCCTCAACTGGATGGGACAACTGG |
| | GAAGAAGTTCCGTTTTGCTCCCACCACTTCAACAAGCTCCATCTCAAGGACGGGAGGTCCATTGTGG |
| | TTCCCTGCCGCCACCAAGATGAACTGATTGGCCGGGCCCGCGTCTCTCCAGGGGCGGGATGGAGCAT |
| | CCGGGAGACTGCTTGCCTAGCAAAATCATATGCGCAAATGTGGCAGCTCCTTTATTTCCACAGAAGG |
| | GACCTCCGACTGATGGCCAATGCCATTTGTTCATCTGTGCCAGTTGACTGGGTTCCAACTGGGAGAA |
| | CTACCTGGTCAATCCATGGAAAGGGAGAATGGATGACCACTGAAGACATGCTTGTGGTGTGGAACAG |
| | AGTGTGGATTGAGGAGAACGACCACATGGAAGACAAGACCCCAGTTACGAAATGGACAGACATTCCC |
| | TATTTGGGAAAAAGGGAAGACTTGTGGTGTGGATCTCTCATAGGGCACAGACCGCGCACCACCTGGG |
| | CTGAGAACATTAAAAACACAGTCAACATGGTGCGCAGGATCATAGGTGATGAAGAAAAGTACATGGA |
| | CTACCTATCCACCCAAGTTCGCTACTTGGGTGAAGAAGGGTCTACACCTGGAGTGCTGTAAGCACCA |
| | ATCTTAATGTTGTCAGGCCTGCTAGTCAGCCACAGCTTGGGGAAAGCTGTGCAGCCTGTGACCCCCC |
| | CAGGAGAAGCTGGGAAACCAAGCCTATAGTCAGGCCGAGAACGCCATGGCACGGAAGAAGCCATGCT |
| | GCCTGTGAGCCCCTCAGAGGACACTGAGTCAAAAAACCCCACGCGCTTGGAGGCGCAGGATGGGAAA |
| | AGAAGGTGGCGACCTTCCCCACCCTTCAATCTGGGGCCTGAACTGGAGATCAGCTGTGGATCTCCAG |
| | AAGAGGGACTAGTGGTTAGAGGAGACCCCCCGGAAAACGCAAAACAGCATATTGACGCTGGGAAAGA |
| | CCAGAGACTCCATGAGTTTCCACCACGCTGGCCGCCAGGCACAGATCGCCGAATAGCGGCGGCCGGT |
| | GTGGGGAAATCCATGGGTCT |
| 294 | GenBank Accession No. KY766069.1 (Zika virus isolate Pf13/251013-18, |
| | complete genome) |
| | CTGTGTGAATCAGACTGCGACAGTTCGAGTTTGAAGCGAAAGCTGCAACAGTTATCAACAGGTTTTA |
| | TTTTGGATTTGGAAACGAGAGTTTCTGGTCATGAAAAACCCAAAAAAGAAATCCGGAGGATTCCGGA |
| | TTGTCAATATGCTAAAACGCGGAGTAGCCCGTGTGAGCCCCTTTGGGGGCTTGAAGAGGCTGCCAGC |
| | CGGACTTCTGCTGGGTCATGGGCCCATCAGGATGGTCTTGGCGATTCTAGCCTTTTTGAGATTCACG |
| | GCAATCAAGGCATCACTGGGTGTCATCAATAGATGGGGTTCAGTGGGGAAAAAAGAGGCTATGGAAA |
| | TAATAAAGAAGTTCAAGAAAGATCTGGCTGCCATGCTGAGAATAATCAATGCTAGGAAGGAGAAGAA |
| | GAGACGAGGCGCAGATACTAGTGTCGGAATTGTTGGCCTCCTGCTGACCACAGCTATGGCAGCGGAG |
| | GTCACTAGACGTGGGAGTGCATACTATATGTACTTGGACAGAAACGATGCTGGGGAGGCCATATCTT |
| | TTCCAACCACATTGGGGATGAATAAGTGTTATATACAGATCATGGATCTTGGACACATGTGTGATGC |
| | CACCATGAGCTATGAATGCCCTATGCTGGATGAGGGGGTGGAACCAGATGACGTCGATTGTTGGTGC |
| | AACACGACGTCAACTTGGGTTGTGTACGGAACCTGCCATCACAAAAAAGGTGAAGCACGGAGATCTA |
| | GAAGAGCTGTGACGCTCCCCTCCCATTCCACTAGAAAGCTGCAAACGCGGTCGCAAACCTGGTTGGA |
| | ATCAAGAGAATACACAAAGCACTTGATTAGAGTCGAAAATTGGATATTCAGGAACCCTGGCTTCGCG |
| | TTAGCAGCAGCTGCCATCGCTTGGCTTTTGGGAAGCTCAACGAGCCAAAAAGTCATATACTTGGTCA |
| | TGATACTGCTGATTGCCCCGGCATACAGCATCAGGTGCATAGGAGTCAGCAATAGGGACTTTGTGGA |
| | AGGTATGTCAGGTGGGACTTGGGTTGATGTTGTCTTGGAACATGGAGGTTGTGTCACCGTAATGGCA |
| | CAGGACAAACCGACTGTCGACATAGAGCTGGTTACAACAACAGTCAGCAACATGGCGGAGGTAAGAT |
| | CCTACTGCTATGAGGCATCAATATCAGACATGGCTTCGGACAGCCGCTGCCCAACACAAGGTGAAGC |
| | CTACCTTGACAAGCAATCAGACACTCAATATGTCTGCAAAAGAACGTTAGTGGACAGAGGCTGGGGA |
| | AATGGATGTGGACTTTTTGGCAAAGGGAGCCTGGTGACATGCGCTAAGTTTGCATGCTCCAAGAAAA |
| | TGACCGGGAAGAGCATCCAGCCAGAGAATCTGGAGTACCGGATAATGCTGTCAGTTCATGGCTCCCA |
| | GCACAGTGGGATGATCGTTAATGACACAGGACATGAAACTGATGAGAATAGAGCGAAGGTTGAGATA |
| | ACGCCCAATTCACCAAGAGCCGAAGCCACCCTGGGGGGTTTTGGAAGCCTAGGACTTGATTGTGAAC |
| | CGAGGACAGGCCTTGACTTTTCAGATTTGTATTACTTGACTATGAATAACAAGCACTGGTTGGTTCA |
| | CAAGGAGTGGTTCCACGACATTCCATTACCTTGGCACGCTGGGGCAGACACCGGAACTCCACACTGG |
| | AACAACAAAGAAGCACTGGTAGAGTTCAAGGACGCACATGCCAAAAGGCAAACTGTCGTGGTTCTAG |
| | GGAGTCAAGAAGGAGCAGTTCACACGGCCCTTGCTGGAGCTCTGGAGGCTGAGATGGATGGTGCAAA |
| | GGGAAGGCTGTCCTCTGGCCACTTGAAATGTCGCCTGAAAATGGATAAACTTAGATTGAAGGGCGTG |
| | TCATACTCCTTGTGTACCGCAGCGTTCACATTCACCAAGATCCCGGCTGAAACACTGCACGGGACAG |
| | TCACAGTGGAGGTACAGTACGCAGGGACAGATGGACCTTGCAAGGTTCCAGCTCAGATGGCGGTGGA |
| | CATGCAAACTCTGACCCCAGTTGGGAGGTTGATAACCGCTAACCCCGTAATCACTGAAAGCACTGAG |
| | AACTCTAAGATGATGCTGGAACTTGATCCACCATTTGGGGACTCTTACATTGTCATAGGAGTCGGGG |
| | AGAAGAAGATCACCCACCACTGGCACAGGAGTGGCAGCACCATTGGAAAAGCATTTGAAGCCACTGT |
| | GAGAGGTGCCAAGAGAATGGCAGTCTTGGGAGACACAGCCTGGGACTTTGGATCAGTTGGAGGCGCT |
| | CTCAACTCATTGGGCAAGGGCATCCATCAAATTTTTGGAGCAGCTTTCAAATCATTGTTTGGAGGAA |
| | TGTCCTGGTTCTCACAAATTCTCATTGGAACGTTGCTGATGTGGTTGGGTCTGAACACAAAGAATGG |
| | ATCTATTTCCCTTATGTGCTTGGCCTTAGGGGGAGTGTTGATCTTCTTATCCACAGCCGTCTCTGCT |
| | GATGTGGGGTGCTCGGTGGACTTCTCAAAGAAGGAGACGAGATGCGGTACAGGGGTGTTCGTCTATA |
| | ACGACGTTGAAGCCTGGAGGGACAGGTACAAGTACCATCCTGACTCCCCCCGTAGATTGGCAGCAGC |
| | AGTCAAGCAAGCCTGGGAAGATGGTATCTGTGGGATCTCCTCTGTTTCAAGAATGGAAAACATCATG |
| | TGGAGATCAGTAGAAGGGGAGCTCAACGCAATCCTGGAAGAGAATGGAGTTCAACTGACGGTCGTTG |
| | TGGGATCTGTAAAAAACCCCATGTGGAGAGGTCCACAGAGATTGCCCGTGCCTGTGAACGAGCTGCC |
| | CCACGGCTGGAAGGCTTGGGGGAAATCGTACTTCGTCAGAGCAGCAAAGACAAATAACAGCTTTGTC |
| | GTGGATGGTGACACACTGAAGGAATGCCCACTCAAACATAGAGCATGGAACAGCTTTCTTGTGGAGG |
| | ATCATGGGTTCGGGGTATTTCACACTAGTGTCTGGCTCAAGGTTAGAGAAGATTATTCATTAGAGTG |
| | TGATCCAGCCGTTATTGGAACAGCTGTTAAGGGAAAGGAGGCTGTACACAGTGATCTAGGCTACTGG |
| | ATTGAGAGTGAGAAGAATGACACATGGAGGCTGAAGAGGGCCCATCTGATCGAGATGAAAACATGTG |
| | AATGGCCAAAGTCCCACACATTGTGGACAGATGGAATAGAAGAGAGTGATCTGATCATACCCAAGTC |
| | TTTAGCTGGGCCACTCAGCCATCACAATACCAGAGAGGGCTACAGGACCCAAATGAAAGGGCCATGG |
| | CACAGTGAAGAGCTTGAAATTCGGTTTGAGGAATGCCCAGGCACTAAGGTCCACGTGGAGGAAACAT |
| | GTGGAACAAGAGGACCATCTCTGAGATCAACCACTGCAAGCGGAAGGGTGATCGAGGAATGGTGCTG |
| | CAGGGAGTGCACAATGCCCCCACTGTCGTTCCGGGCTAAAGATGGCTGTTGGTATGGAATGGAGATA |
| | AGGCCCAGGAAAGAACCAGAAAGTAACTTAGTAAGGTCAATGGTGACTGCAGGATCAACTGATCACA |
| | TGGATCACTTCTCCCTTGGAGTGCTTGTGATTCTGCTCATGGTGCAGGAAGGGCTGAAGAAGAGAAT |
| | GACCACAAAGATCATCATAAGCACATCAATGGCAGTGCTGGTAGCTATGATCCTGGGAGGATTTTCA |
| | ATGAGTGACCTGGCTAAGCTTGCAATTTTGATGGGTGCCACCTTCGCGGAAATGAACACTGGAGGAG |
| | ATGTAGCTCATCTGGCGCTGATAGCGGCATTCAAAGTCAGACCAGCGTTGCTGGTATCTTTCATCTT |
| | CAGAGCTAATTGGACACCCCGTGAAAGCATGCTGCTGGCCTTGGCCTCGTGTCTTTTGCAAACTGCG |
| | ATCTCCGCCTTGGAAGGCGACCTGATGGTTCTCATCAATGGTTTTGCTTTGGCCTGGTTGGCAATAC |
| | GAGCGATGGTTGTTCCACGCACTGATAACATCACCTTGGCAATCCTGGCTGCTCTGACACCACTGGC |
| | CCGGGGCACACTGCTTGTGGCGTGGAGAGCAGGCCTTGCTACTTGCGGGGGGTTTATGCTCCTCTCT |
| | CTGAAGGGAAAAGGCAGTGTGAAGAAGAACTTACCATTTGTCATGGCCCTGGGACTAACCGCTGTGA |
| | GGCTGGTCGACCCCATCAACGTGGTGGGACTGCTGTTGCTCACAAGGAGTGGGAAGCGGAGCTGGCC |
| | CCCTAGCGAAGTACTCACAGCTGTTGGCCTGATATGCGCATTGGCTGGAGGGTTCGCCAAGGCAGAT |
| | ATAGAGATGGCTGGGCCCATGGCCGCGGTCGGTCTGCTAATTGTCAGTTACGTGGTCTCAGGAAAGA |
| | GTGTGGACATGTACATTGAAAGAGCAGGTGACATCACATGGGAAAAAGATGCGGAAGTCACTGGAAA |
| | CAGTCCCCGGCTCGATGTGGCGCTAGATGAGAGTGGTGATTTCTCCCTGGTGGAGGATGACGGTCCC |
| | CCCATGAGAGAGATCATACTCAAGGTGGTCCTGATGACCATCTGTGGCATGAACCCAATAGCCATAC |
| | CCTTTGCAGCTGGAGCGTGGTACGTATACGTGAAGACTGGAAAAAGGAGTGGTGCTCTATGGGATGT |
| | GCCTGCTCCCAAGGAAGTAAAAAAGGGGGAGACCACAGATGGAGTGTACAGAGTAATGACTCGTAGA |
| | CTGCTAGGTTCAACACAAGTTGGAGTGGGAGTTATGCAAGAGGGGGTCTTTCACACTATGTGGCACG |
| | TCACAAAAGGATCCGCGCTGAGAAGCGGTGAAGGGAGACTTGATCCATACTGGGGAGATGTCAAGCA |
| | GGATCTGGTGTCATACTGTGGTCCATGGAAGCTAGATGCCGCCTGGGACGGGCACAGCGAGGTGCAG |
| | CTCTTGGCCGTGCCCCCCGGAGAGAGAGCGAGGAACATCCAGACTCTGCCCGGAATATTTAAGACAA |
| | AGGATGGGGACATTGGAGCGGTTGCGCTGGATTACCCAGCAGGAACTTCAGGATCTCCAATCCTAGA |
| | CAAGTGTGGGAGAGTGATAGGACTTTATGGCAATGGGGTCGTGATCAAAAATGGGAGTTATGTTAGT |
| | GCCATCACCCAAGGGAGGAGGGAGGAAGAGACTCCTGTTGAGTGCTTCGAGCCTTCGATGCTGAAGA |
| | AGAAGCAGCTAACTGTCTTAGACTTGCATCCTGGAGCTGGGAAAACCAGGAGAGTTCTTCCTGAAAT |
| | AGTCCGTGAAGCCATAAAAACAAGACTCCGTACTGTGATCTTAGCTCCAACCAGGGTTGTCGCTGCT |
| | GAAATGGAGGAAGCCCTTAGAGGGCTTCCAGTGCGTTATATGACAACAGCAGTCAATGTCACCCACT |
| | CTGGAACAGAAATCGTCGACTTAATGTGCCATGCCACCTTCACTTCACGTCTACTACAGCCAATCAG |
| | AGTCCCTAACTATAATCTGTATATTATGGATGAGGCCCACTTCACAGATCCCTCAAGTATAGCAGCA |
| | AGAGGATACATTTCAACAAGGGTTGAGATGGGCGAGGCGGCTGCCATCTTCATGACCGCCACGCCAC |
| | CAGGAACCCGTGACGCATTTCCGGACTCCAACTCACCAATTATGGACACCGAAGTGGAAGTCCCAGA |
| | GAGAGCCTGGAGCTCAGGCTTTGATTGGGTGACGGATCATTCTGGAAAAACAGTTTGGTTTGTTCCA |
| | AGCGTGAGGAACGGCAATGAGATCGCAGCTTGTCTGACAAAGGCTGGAAAACGGGTCATACAGCTCA |
| | GCAGAAAGACTTTTGAGACAGAGTTCCAGAAAACAAAACATCAAGAGTGGGACTTTGTCGTGACAAC |
| | TGACATTTCAGAGATGGGCGCCAACTTTAAAGCTGACCGTGTCATAGATTCCAGGAGATGCCTAAAG |
| | CCGGTCATACTTGATGGCGAGAGAGTCATTCTGGCTGGACCCATGCCTGTCACACATGCCAGCGCTG |
| | CCCAGAGGAGGGGGCGCATAGGCAGGAATCCCAACAAACCTGGAGATGAGTATCTGTATGGAGGTGG |
| | GTGCGCAGAGACTGACGAAGACCATGCACACTGGCTTGAAGCAAGAATGCTCCTTGACAATATTTAC |
| | CTCCAAGATGGCCTCATAGCCTCGCTCTATCGACCTGAGGCCGACAAAGTAGCAGCCATTGAGGGAG |
| | AGTTCAAGCTTAGGACGGAGCAAAGGAAGACCTTTGTGGAACTCATGAAAAGAGGAGATCTTCCTGT |
| | TTGGCTGGCCTATCAGGTTGCATCTGCCGGAATAACCTACACAGATAGAAGATGGTGCTTTGATGGC |
| | ACGACCAACAACACCATAATGGAAGACAGTGTGCCGGCAGAGGTGTGGACCAGACACGGAGAGAAAA |
| | GAGTGCTCAAACCGAGGTGGATGGACGCCAGAGTTTGTTCAGATCATGCGGCCCTGAAGTCATTCAA |
| | GGAGTTTGCCGCTGGGAAAAGAGGAGCGGCTTTTGGAGTGATGGAAGCCCTGGGAACACTGCCAGGA |
| | CACATGACAGAGAGATTCCAGGAAGCCATTGACAACCTCGCTGTGCTCATGCGGGCAGAGACTGGAA |
| | GCAGGCCTTACAAAGCCGCGGCGGCCCAATTGCCGGAGACCCTAGAGACCATTATGCTTTTGGGGTT |
| | GCTGGGAACAGTCTCGCTGGGAATCTTTTTCGTCTTGATGAGGAACAAGGGCATAGGGAAGATGGGC |
| | TTTGGAATGGTGACTCTTGGGGCCAGCGCATGGCTCATGTGGCTCTCGGAAATTGAGCCAGCCAGAA |
| | TTGCATGTGTCCTCATTGTTGTGTTCCTATTGCTGGTGGTGCTCATACCTGAGCCAGAAAAGCAAAG |
| | ATCTCCCCAGGACAACCAAATGGCAATCATCATCATGGTAGCAGTAGGTCTTCTGGGCTTGATTACC |
| | GCCAATGAACTCGGATGGTTGGAGAGAACAAAGAGTGACCTAAGCCATCTAATGGGAAGGAGAGAGG |
| | AGGGGGCAACCATAGGATTCTCAATGGACATTGACCTGCGGCCAGCCTCAGCTTGGGCCATCTATGC |
| | TGCCTTGACAACTTTCATTACCCCAGCCGTCCAACATGCAGTGACCACTTCATACAACAACTACTCC |
| | TTAATGGCGATGGCCACGCAAGCTGGAGTGTTGTTTGGTATGGGCAAAGGGATGCCATTCTACGCAT |
| | GGGACTTTGGAGTCCCGCTGCTAATGATAGGTTGCTACTCACAATTAACACCCCTGACCCTAATAGT |
| | GGCCATCATTTTGCTCGTGGCGCACTACATGTACTTGATCCCAGGGCTGCAGGCAGCAGCTGCGCGT |
| | GCTGCCCAGAAGAGAACGGCAGCTGGCATCATGAAGAACCCTGTTGTGGATGGAATAGTGGTGACTG |
| | ACATTGACACAATGACAATTGACCCCCAAGTGGAGAAAAAGATGGGACAGGTGCTACTCATAGCAGT |
| | AGCCGTCTCCAGCGCCATACTGTCGCGGACCGCCTGGGGGTGGGGGGAGGCTGGGGCCCTGATCACA |
| | GCTGCAACTTCCACTTTGTGGGAAGGCTCTCCGAACAAGTACTGGAACTCCTCTACAGCCACTTCAC |
| | TGTGTAACATTTTTAGGGGAAGTTACTTGGCTGGAGCTTCTCTAATCTACACAGTAACAAGAAACGC |
| | TGGCTTGGTCAAGAGACGTGGGGGTGGAACAGGAGAGACCCTGGGAGAGAAATGGAAGGCCCGCTTG |
| | AACCAGATGTCGGCCCTGGAGTTCTACTCCTACAAAAAGTCAGGCATCACCGAGGTGTGCAGAGAAG |
| | AGGCCCGCCGCGCCCTCAAGGACGGTGTGGCAACGGGAGGCCATGCTGTGTCCCGAGGAAGTGCAAA |
| | GCTGAGATGGTTGGTGGAGCGGGGATACCTGCAGCCCTATGGAAAGGTCATTGATCTTGGATGTGGC |
| | AGAGGGGGCTGGAGTTACTACGCCGCCACCATCCGCAAAGTTCAAGAAGTGAAAGGATACACAAAAG |
| | GAGGCCCTGGTCATGAAGAACCCATGTTGGTGCAAAGCTATGGGTGGAACATAGTCCGTCTTAAGAG |
| | TGGGGTGGACGTCTTTCATATGGCGGCTGAGCCGTGTGACACGTTGCTGTGTGACATAGGTGAGTCA |
| | TCATCTAGTCCTGAAGTGGAAGAAGCACGGACGCTCAGAGTCCTCTCCATGGTGGGGGATTGGCTTG |
| | AAAAAAGACCAGGAGCCTTTTGTATAAAAGTGTTGTGCCCATACACCAGCACTATGATGGAAACCCT |
| | GGAGCGACTGCAGCGTAGGTATGGGGGAGGACTGGTCAGAGTGCCACTCTCCCGCAACTCTACACAT |
| | GAGATGTACTGGGTCTCTGGAGCGAAAAGCAACACCATAAAAAGTGTGTCCACCACGAGCCAGCTCC |
| | TCTTGGGGCGCATGGACGGGCCCAGGAGGCCAGTGAAATATGAGGAGGATGTGAATCTCGGCTCTGG |
| | CACGCGGGCTGTGGTAAGCTGCGCTGAAGCTCCCAACATGAAGATCATTGGTAACCGCATTGAAAGG |
| | ATCCGCAGTGAGCACGCGGAAACGTGGTTCTTTGACGAGAACCACCCATATAGGACATGGGCTTACC |
| | ATGGAAGCTATGAGGCCCCCACACAAGGGTCAGCGTCCTCTCTAATAAACGGGGTTGTCAGGCTCCT |
| | GTCAAAACCCTGGGATGTGGTGACTGGAGTCACAGGAATAGCCATGACCGACACCACACCGTATGGT |
| | CAGCAAAGAGTTTTCAAGGAAAAAGTGGACACTAGGGTGCCAGACCCCCAAGAAGGCACTCGTCAGG |
| | TTATGAGCATGGTCTCTTCCTGGTTGTGGAAAGAGCTAGGCAAACACAAACGGCCACGAGTCTGTAC |
| | CAAAGAAGAGTTCATCAACAAGGTTCGTAGCAATGCAGCATTAGGGGCAATATTTGAAGAGGAAAAA |
| | GAGTGGAAGACTGCAGTGGAAGCTGTGAAGGATCCAAGGTTCTGGGCTCTAGTGGACAAGGAAAGAG |
| | AGCACCACCTGAGAGGAGAGTGCCAGAGTTGTGTGTACAACATGATGGGAAAAAGAGAAAAGAAACA |
| | AGGGGAATTTGGAAAGGCCAAGGGCAGCCGCGCCATCTGGTATATGTGGCTAGGGGCTAGATTTCTA |
| | GAGTTCGAAGCCCTTGGATTCTTGAACGAGGATCACTGGATGGGGAGAGAGAACTCAGGAGGTGGTG |
| | TTGAAGGGCTGGGATTACAAAGACTCGGATATGTCCTAGAAGAGATGAGTCGCATACCAGGAGGAAG |
| | GATGTATGCAGATGACACTGCTGGCTGGGACACCCGCATCAGCAGGTTTGATCTGGAGAATGAAGCT |
| | CTAATCACCAACCAAATGGAGAAAGGGCACAGGGCCTTGGCATTGGCCATAATCAAGTACACATACC |
| | AAAACAAAGTGGTAAAGGTCCTTAGACCAGCTGAAAAAGGGAAGACAGTTATGGACATTATTTCGAG |
| | ACAAGACCAAAGGGGGAGCGGACAAGTTGTCACTTACGCTCTTAACACATTTACCAACCTAGTGGTG |
| | CAACTCATTCGGAATATGGAGGCTGAGGAAGTTCTAGAGATGCAAGACTTGTGGCTGCTGCGGAGGT |
| | CAGAGAAAGTGACCAACTGGTTGCAGAGCAACGGATGGGATAGGCTCAAACGAATGGCAGTCAGTGG |
| | AGATGATTGCGTTGTGAAGCCAATTGATGATAGGTTTGCACATGCCCTCAGGTTCTTGAATGATATG |
| | GGAAAAGTTAGGAAGGACACACAAGAGTGGAAACCCTCAACTGGATGGGACAACTGGGAAGAAGTTC |
| | CGTTTTGCTCCCACCACTTCAACAAGCTCCATCTCAAGGACGGGAGGTCCATTGTGGTTCCCTGCCG |
| | CCACCAAGATGAACTGATTGGCCGGGCCCGCGTCTCTCCAGGGGCGGGATGGAGCATCCGGGAGACT |
| | GCTTGCCTAGCAAAATCATATGCGCAAATGTGGCAGCTCCTTTATTTCCACAGAAGGGACCTCCGAC |
| | TGATGGCCAATGCCATTTGTTCATCTGTGCCAGTTGACTGGGTTCCAACTGGGAGAACTACCTGGTC |
| | AATCCATGGAAAGGGAGAATGGATGACCACTGAAGACATGCTTGTGGTGTGGAACAGAGTGTGGATT |
| | GAGGAGAACGACCACATGGAAGACAAGACCCCAGTTACGAAATGGACAGACATTCCCTATTTGGGAA |
| | AAAGGGAAGACTTGTGGTGTGGATCTCTCATAGGGCACAGACCGCGCACCACCTGGGCTGAGAACAT |
| | TAAAAACACAGTCAACATGGTGCGCAGGATCATAGGTGATGAAGAAAAGTACATGGACTACCTATCC |
| | ACCCAAGTTCGCTACTTGGGTGAAGAAGGGTCTACACCTGGAGTGCTGTAAGCACCAATCTTAGTGT |
| | TGTCAGGCCTGCTAGTCAGCCACAGCTTGGGGAAAGCTGTGCAGCCTGTGACCCCCCCAGGAGAAGC |
| | TGGGAAACCAAGCCTATAGTCAGGCCGAGAACGCCATGGCACGGAAGAAGCCATGCTGCCTGTGAGC |
| | CCCTCAGAGGACACTGAGTCAAAAAACCCCACGCGCTTGGAGGCGCAGGATGGGAAAAGAAGGTGGC |
| | GACCTTCCCCACCCTTCAATCTGGGGCCTGAACTGGAGATCAGCTGTGGATCTCCAGAAGAGGGACT |
| | AGTGGTTAGAGGAGGTCCACAGAAGGGACCTCCGCAGCATATTGACGCTGGGAAAGACCAGAGACTC |
| | CATGAGTTTCCACCACGCTGGCCGCCAGGCACAGATCGCCGATTAAGAATTCCACCAAAAAGAATTC |
| | TGCTGCCATACCATCTCCGAGGATGTCCCATAAACTTGGTTGCAGAGTTTTGTGAAATGTTGCACTC |
| | CAGTAGAAGGCAGCAGACTAGGCTGGGCGTGGCGGCTCATGCCTGTAATCCCAGCACTTTGGGAGGT |
| | TGAGGCAGGTGGATCACCTGAGGTCAGGAGTTCGAGACCAGCTTGGCCAACATGGTGAAACCCCGTC |
| | TCTACTAGAAACACAAACAATTAGCCAGGCATGGTGGCGGGCGCTGTAATCCTAGCTACTCGGGAGA |
| | CTGAGGCAGGAGAATTGCTTGAACCCAGGAGGCAGAGGTTGCAGTGAGCTGAGATCGCACCATTGCA |
| | CTCCAGCCTGGGCGACAGAGCAAGACTCCGTCT |
| 295 | GenBank Accession Nos. NC_035889.1/ KU527068.1 (Zika virus isolate ZIKV/H. |
| | sapiens/Brazil/Natal/2015, complete genome) |
| | AGTTGTTGATCTGTGTGAATCAGACTGCGACAGTTCGAGTTTGAAGCGAAAGCTAGCAACAGTATCA |
| | ACAGGTTTTATTTTGGATTTGGAAACGAGAGTTTCTGGTCATGAAAAACCCAAAAAAGAAATCCGGA |
| | GGATTCCGGATTGTCAATATGCTAAAACGCGGAGTAGCCCGTGTGAGCCCCTTTGGGGGCTTGAAGA |
| | GGCTGCCAGCCGGACTTCTGCTGGGTCATGGGCCCATCAGGATGGTCTTGGCAATTCTAGCCTTTTT |
| | GAGATTCACGGCAATCAAGCCATCACTGGGTCTCATCAATAGATGGGGTTCAGTGGGGAAAAAAGAG |
| | GCTATGGAAATAATAAAGAAGTTCAAGAAAGATCTGGCTGCCATGCTGAGAATAATCAATGCTAGGA |
| | AGGAGAAGAAGAGACGAGGCGCAGATACTAGTGTCGGAATTGTTGGCCTCCTGCTGACCACAGCTAT |
| | GGCAGCGGAGGTCACTAGACGTGGGAGTGCATACTATATGTACTTGGACAGAAACGATGCTGGGGAG |
| | GCCATATCTTTTCCAACCACATTGGGGATGAATAAGTGTTATATACAGATCATGGATCTTGGACACA |
| | TGTGTGATGCCACCATGAGCTATGAATGCCCTATGCTGGATGAGGGGGTGGAACCAGATGACGTCGA |
| | TTGTTGGTGCAACACGACGTCAACTTGGGTTGTGTACGGAACCTGCCATCACAAAAAAGGTGAAGCA |
| | CGGAGATCTAGAAGAGCTGTGACGCTCCCCTCCCATTCCACTAGGAAGCTGCAAACGCGGTCGCAAA |
| | CCTGGTTGGAATCAAGAGAATACACAAAGCACTTGATTAGAGTCGAAAATTGGATATTCAGGAACCC |
| | TGGCTTCGCGTTAGCAGCAGCTGCCATCGCTTGGCTTTTGGGAAGCTCAACGAGCCAAAAAGTCATA |
| | TACTTGGTCATGATACTGCTGATTGCCCCGGCATACAGCATCAGGTGCATAGGAGTCAGCAATAGGG |
| | ACTTTGTGGAAGGTATGTCAGGTGGGACTTGGGTTGATGTTGTCTTGGAACATGGAGGTTGTGTCAC |
| | CGTAATGGCACAGGACAAACCGACTGTCGACATAGAGCTGGTTACAACAACAGTCAGCAACATGGCG |
| | GAGGTAAGATCCTACTGCTATGAGGCATCAATATCAGACATGGCTTCGGACAGCCGCTGCCCAACAC |
| | AAGGTGAAGCCTACCTTGACAAGCAATCAGACACTCAATATGTCTGCAAAAGAACGTTAGTGGACAG |
| | AGGCTGGGGAAATGGATGTGGACTTTTTGGCAAAGGGAGCCTGGTGACATGCGCTAAGTTTGCATGC |
| | TCCAAGAAAATGACCGGGAAGAGCATCCAGCCAGAGAATCTGGAGTACCGGATAATGCTGTCAGTTC |
| | ATGGCTCCCAGCACAGTGGGATGATCGTTAATGACACAGGACATGAAACTGATGAGAATAGAGCGAA |
| | GGTTGAGATAACGCCCAATTCACCAAGAGCCGAAGCCACCCTGGGGGGTTTTGGAAGCCTAGGACTT |
| | GATTGTGAACCGAGGACAGGCCTTGACTTTTCAGATTTGTATTACTTGACTATGAATAACAAGCACT |
| | GGTTGGTCCACAAGGAGTGGTTCCACGACATTCCATTACCTTGGCACGCTGGGGCAGACACCGGAAC |
| | TCCACACTGGAACAACAAAGAAGCACTGGTAGAGTTCAAGGACGCACATGCCAAAAGGCAAACTGTC |
| | GTGGTTCTAGGGAGTCAAGAAGGAGCAGTTCACACGGCCCTTGCTGGAGCTCTGGAGGCTGAGATGG |
| | ATGGTGCAAAGGGAAGGCTGTCCTCTGGCCACTTGAAATGTCGCCTGAAAATGGATAAACTTAGATT |
| | GAAGGGCGTGTCATACTCCTTGTGTACCGCAGCGTTCACATTCACCAAGATCCCGGCTGAAACACTG |
| | CACGGGACAGTCACAGTGGAGGTACAGTACGCAGGGACAGATGGACCTTGCAAGGTTCCAGCTCAGA |
| | TGGCGGTGGACATGCAAACTCTGACCCCAGTTGGGAGGTTGATAACCGCTAACCCCGTAATCACTGA |
| | AAGCACTGAGAACTCTAAGATGATGCTGGAACTTGATCCACCATTTGGGGACTCTTACATTGTCATA |
| | GGAGTCGGGGAGAAGAAGATCACCCACCACTGGCACAGGAGTGGCAGCACCATTGGAAAAGCATTTG |
| | AAGCCACTGTGAGAGGTGCCAAGAGAATGGCAGTCTTGGGAGACACAGCCTGGGACTTTGGATCAGT |
| | TGGAGGCGCTCTCAACTCATTGGGCAAGGGCATCCATCAAATTTTTGGAGCAGCTTTCAAATCATTG |
| | TTTGGAGGAATGTCCTGGTTCTCACAAATCCTCATTGGAACGTTGCTGATGTGGTTGGGTCTGAACA |
| | CAAAGAATGGATCTATTTCCCTTATGTGCTTGGCCTTAGGGGGAGTGTTGATCTTCTTATCCACAGC |
| | CGTCTCTGCTGATGTGGGGTGCTCGGTGGACTTCTCAAAGAAGGAGACGAGATGCGGTACAGGGGTG |
| | TTCGTCTATAACGACGTTGAAGCCTGGAGGGACAGGTACAAGTACCATCCTGACTCCCCCCGTAGAT |
| | TGGCAGCAGCAGTCAAGCAAGCCTGGGAAGATGGTATCTGCGGGATCTCCTCTGTTTCAAGAATGGA |
| | GAACATCATGTGGAGATCAGTAGAAGGGGAGCTCAACGCAATCTTGGAAGAGAATGGAGTTCAACTG |
| | ACGGTCGTTGTGGGATCTGTAAAAAACCCCATGTGGAGAGGTCCACAGAGATTGCCCGTGCCTGTGA |
| | ACGAGCTGCCCCACGGCTGGAAGGCTTGGGGGAAATCGTACTTCGTCAGAGCAGCAAAGACAAATAA |
| | CAGCTTTGTCGTGGATGGTGACACACTGAAGGAATGCCCACTCGAACATAGAGCATGGAACAGCTTT |
| | CTTGTGGAGGATCATGGGTTCGGGGTATTTCACACTAGTGTCTGGCTCAAGGTTAGAGAAGATTATT |
| | CATTAGAGTGTGATCCAGCCGTTATTGGAACAGCTGTTAAGGGGAAGGAGGCTGTACACAGTGATCT |
| | AGGCTACTGGATTGAGAGTGAGAAGAATGACACATGGAGGCTGAAGAGGGCCCATCTAATCGAGATG |
| | AAAACATGTGAATGGCCAAAGTCCCACACATTGTGGGCAGATGGAATAGAAGAGAGTGATCTGATCA |
| | TTCCCAAGTCTTTAGCTGGGCCACTCAGCCATCACAATACCAGAGAGGGCTACAGGACCCAAATGAA |
| | AGGGCCATGGCACAGTGAAGAGCTTGAAATTCGGTTTGAGGAATGCCCGGGCACTAAGGTCCACGTG |
| | GAGGAAACATGTGGAACAAGAGGACCATCTCTGAGATCAACCACTGCAAGCGGAAGGGTGATCGAGG |
| | AATGGTGCTGCAGGGAGTGCACAATGCCCCCACTGTCGTTCCGGGCTAAAGATGGCTGTTGGTATGG |
| | AATGGAGATAAGGCCCAGGAAAGAACCAGAAAGCAACTTAGTAAGGTCAGTGGTGACTGCAGGATCA |
| | ACTGATCACATGGATCACTTCTCCCTTGGAGTGCTTGTGATTCTGCTCATGGTGCAGGAAGGGCTGA |
| | AGAAGAGAATGACCACAAAGATCATCATAAGCACATCAATGGCAGTGCTGGTAGCTATGATCCTGGG |
| | AGGATTTTCAATGAGTGACCTGGCTAAGCTTGCAATTTTGATGGGCGCCACCTTCGCGGAAATGAAC |
| | ACTGGAGGAGATGTAGCTCATCTGGCGCTGATAGCGGCATTCAAAGTCAGACCAGCGTTGCTGGTAT |
| | CTTTCATCTTCAGAGCTAATTGGACACCCCGTGAAAGCATGCTGCTGGCCTTGGCCTCGTGTCTTTT |
| | GCAAACTGCGATCTCCGCCTTGGAAGGCGACCTGATGGTTCTCATCAATGGTTTTGCTTTGGCCTGG |
| | TTGGCAATACGAGCGATGGTTGTTCCACGCACTGATAACATCACCTTGGCAATCCTGGCTGCTCTGA |
| | CACCACTGGCCCGGGGCACACTGCTTGTGGCGTGGAGAGCAGGCCTTGCTACTTGCGGGGGGTTTAT |
| | GCTCCTCTCTCTGAAGGGAAAAGGCAGTGTGAAGAAGAACTTACCATTTGTCATGGCCCTGGGACTA |
| | ACCGCTGTGAGGCTGGTCGACCCCATCAACGTGGTGGGACTGCTGTTGCTCACAAGGAGTGGGAAGC |
| | GGAGCTGGCCCCCTAGCGAAGTACTCACAGCTGTTGGCCTGATATGCGCATTGGCTGGAGGGTTCGC |
| | CAAGGCAGATATAGAGATGGCTGGGCCCATGGCCGCGGTCGGTCTGCTAATTGTCAGTTACGTGGTC |
| | TCAGGAAAGAGTGTGGAGATGTACATTGAAAGAGCAGGTGACATCACATGGGAAAAAGATGCGGAAG |
| | TCACTGGAAACAGTCCCCGGCTCGATGTGGCGCTAGATGAGAGTGGTGATTTCTCCCTGGTGGAGGA |
| | TGACGGTCCCCCCATGAGAGAGATCATACTCAAGGTGGTCCTGATGACCATCTGTGGCATGAACCCA |
| | ATAGCCATACCCTTTGCAGCTGGAGCGTGGTACGTATACGTGAAGACTGGAAAAAGGAGTGGTGCTC |
| | TATGGGATGTGCCTGCTCCCAAGGAAGTAAAAAAGGGGGAGACCACAGATGGAGTGTACAGAGTAAT |
| | GACTCGTAGACTGCTAGGTTCAACACAAGTTGGAGTGGGAGTTATGCAAGAGGGGGTCTTTCACACT |
| | ATGTGGCACGTCACAAAAGGATCCGCGCTGAGAAGCGGTGAAGGGAGACTTGATCCATACTGGGGAG |
| | ATGTCAAGCAGGATCTGGTGTCATACTGTGGTCCATGGAAGCTAGATGCCGCCTGGGACGGGCACAG |
| | CGAGGTGCAGCTCTTGGCCGTGCCCCCCGGAGAGAGAGCGAGGAACATCCAGACTCTGCCCGGAATA |
| | TTTAAGACAAAGGATGGGGACATTGGAGCGGTTGCGCTGGATTACCCAGCAGGAACTTCAGGATCTC |
| | CAATCCTAGACAAGTGTGGGAGAGTGATAGGACTTTATGGCAATGGGGTCGTGATCAAAAATGGGAG |
| | TTATGTTAGTGCCATCACCCAAGGGAGGAGGGAGGAAGAGACTCCTGTTGAGTGCTTCGAGCCTTCG |
| | ATGCTGAAGAAGAAGCAGCTAACTGTCTTAGACTTGCATCCTGGAGCTGGGAAAACCAGGAGAGTTC |
| | TTCCTGAAATAGTCCGTGAAGCCATAAAAACAAGACTCCGTACTGTGATCTTAGCTCCAACCAGGGT |
| | TGTCGCTGCTGAAATGGAGGAAGCCCTTAGAGGGCTTCCAGTGCGTTATATGACAACAGCAGTCAAT |
| | GTCACCCACTCTGGAACAGAAATCGTCGACTTAATGTGCCATGCCACCTTCACTTCACGTCTACTAC |
| | AGCCAATCAGAGTCCCCAACTATAATCTGTATATTATGGATGAGGCCCACTTCACAGATCCCTCAAG |
| | TATAGCAGCAAGAGGATACATTTCAACAAGGGTTGAGATGGGCGAGGCGGCTGCCATCTTCATGACC |
| | GCCACGCCACCAGGAACCCGTGACGCATTTCCGGACTCCAACTCACCAATTATGGACACCGAAGTGG |
| | AAGTCCCAGAGAGAGCCTGGAGCTCAGGCTTTGATTGGGTGACGGATCATTCTGGAAAAACAGTTTG |
| | GTTTGTTCCAAGCGTGAGGAACGGCAATGAGATCGCAGCTTGTCTGACAAAGGCTGGAAAACGGGTC |
| | ATACAGCTCAGCAGAAAGACTTTTGAGACAGAGTTCCAGAAAACAAAACATCAAGAGTGGGACTTTG |
| | TCGTGACAACTGACATTTCAGAGATGGGCGCCAACTTTAAAGCTGACCGTGTCATAGATTCCAGGAG |
| | ATGCCTAAAGCCGGTCATACTTGATGGCGAGAGAGTCATTTTGGCTGGACCCATGCCTGTCACACAT |
| | GCCAGCGCTGCCCAGAGGAGGGGGCGCATAGGCAGGAATCCCAACAAACCTGGAGATGAGTATCTGT |
| | ATGGAGGTGGGTGCGCAGAGACTGACGAAGACCATGCACACTGGCTTGAAGCAAGAATGCTCCTTGA |
| | CAATATTTACCTCCAAGATGGCCTCATAGCCTCGCTCTATCGACCTGAGGCCGACAAAGTAGCAGCC |
| | ATTGAGGGAGAGTTCAAGCTTAGGACGGAGCAAAGGAAGACCTTTGTGGAACTCATGAAAAGAGGAG |
| | ATCTTCCTGTTTGGCTGGCCTATCAGGTTGCATCTGCCGGAATAACCTACACAGATAGAAGATGGTG |
| | CTTTGATGGCACGACCAACAACACCATAATGGAAGACAGTGTGCCGGCAGAGGTGTGGACCAGACAC |
| | GGAGAGAAAAGAGTGCTCAAACCGAGGTGGATGGACGCCAGAGTTTGTTCAGATCATGCGGCCCTGA |
| | AGTCATTCAAGGAGTTTGCCGCTGGGAAAAGAGGAGCGGCTTTTGGAGTGATGGAAGCCCTGGGAAC |
| | ACTGCCAGGACACATGACAGAGAGATTCCAGGAAGCCATTGACAACCTCGCTGTGCTCATGCGGGCA |
| | GAGACTGGAAGCAGGCCTTACAAAGCCGCGGCGGCCCAATTGCCGGAGACCCTAGAGACCATTATGC |
| | TTTTGGGGTTGCTGGGAACAGTCTCGCTGGGAATCTTTTTCGTCTTGATGAGGAACAAGGGCATAGG |
| | GAAGATGGGCTTTGGAATGGTGACTCTTGGGGCCAGCGCATGGCTCATGTGGCTCTCGGAAATTGAG |
| | CCAGCCAGAATTGCATGTGTCCTCATTGTTGTGTTCCTATTGCTGGTGGTGCTCATACCTGAGCCAG |
| | AAAAGCAAAGATCTCCCCAGGACAACCAAATGGCAATCATCATCATGGTAGCAGTAGGTCTTCTGGG |
| | CTTGATTACCGCCAATGAACTCGGATGGTTGGAGAGAACAAAGAGTGACCTAAGCCATCTAATGGGA |
| | AGGAGAGAGGAGGGAGCAACCATAGGATTCTCAATGGACATTGACCTGCGGCCAGCCTCAGCTTGGG |
| | CCATCTATGCTGCCTTGACAACTTTCATTACCCCAGCCGTCCAACATGCAGTGACCACTTCATACAA |
| | CAACTACTCCTTAATGGCGATGGCCACGCAAGCTGGAGTGTTGTTTGGTATGGGCAAAGGGATGCCA |
| | TTCTACGCATGGGACTTTGGAGTCCCGCTGCTAATGATAGGTTGCTACTCACAATTAACACCCCTGA |
| | CCCTAATAGTGGCCATCATTTTGCTCGTGGCGCACTACATGTACTTGATCCCAGGGCTGCAGGCAGC |
| | AGCTGCGCGTGCTGCCCAGAAGAGAACGGCAGCTGGCATCATGAAGAACCCTGTTGTGGATGGAATA |
| | GTGGTGACTGACATTGACACAATGACAATTGACCCCCAAGTGGAGAAAAAGATGGGACAGGTGCTAC |
| | TCATAGCAGTAGCAGTCTCCAGCGCCATACTGTCGCGGACCGCCTGGGGGTGGGGGGAGGCTGGGGC |
| | CCTGATCACAGCCGCAACTTCCACTTTGTGGGAAGGCTCTCCGAACAAGTACTGGAACTCCTCTACA |
| | GCCACTTCACTGTGTAACATTTTTAGGGGAAGTTACTTGGCTGGAGCTTCTCTAATCTACATAGTAA |
| | CAAGAAACGCTGGCTTGGTCAAGAGACGTGGGGGTGGAACAGGAGAGACCCTGGGAGAGAAATGGAA |
| | GGCCCGCTTGAACCAGATGTCGGCCCTGGAGTTCTACTCCTACAAAAAGTCAGGCATCACCGAGGTG |
| | TGCAGAGAAGAGGCCCGCCGCGCCCTCAAGGATGGTGTGGCAACGGGAGGCCATGCTGTGTCCCGAG |
| | GAAGTGCAAAGCTGAGATGGTTGGTGGAGCGGGGATACCTGCAGCCCTATGGAAAGGTCATTGATCT |
| | TGGATGTGGCAGAGGGGGCTGGAGTTACTACGCCGCCACCATCCGCAAAGTTCAAGAAGTGAAAGGA |
| | TACACAAAAGGAGGCCCTGGTCATGAAGAACCCGTGTTGGTGCAAAGCTATGGGTGGAACATAGTCC |
| | GTCTTAAGAGTGGGGTGGACGTCTTTCATATGGCGGCTGAGCCGTGTGACACGTTGCTGTGTGACAT |
| | AGGTGAGTCATCATCTAGTCCTGAAGTGGAAGAAGCACGGACGCTCAGAGTCCTCTCCATGGTGGGG |
| | GATTGGCTTGAAAAAAGACCAGGAGCCTTTTGTATAAAAGTGTTGTGCCCATACACCAGCACTATGA |
| | TGGAAACCCTGGAGCGACTGCAGCGTAGGTATGGGGGAGGACTGGTCAGAGTGCCACTCTCCCGCAA |
| | CTCTACACATGAGATGTACTGGGTCTCTGGAGCGAAAAGCAACACCATAAAAAGTGTGTCCACCACG |
| | AGCCAGCTCCTCTTGGGGCGCATGGACGGGCCTAGGAGGCCAGTGAAATATGAGGAGGATGTGAATC |
| | TCGGCTCTGGCACGCGGGCTGTGGTAAGCTGCGCTGAAGCTCCCAACATGAAGATCATTGGTAACCG |
| | CATTGAAAGGATCCGCAGTGAGCACGCGGAAACGTGGTTCTTTGACGAGAACCACCCATATAGGACA |
| | TGGGCTTACCATGGAAGCTATGAGGCCCCCACACAAGGGTCAGCGTCCTCTCTAATAAACGGGGTTG |
| | TCAGGCTCCTGTCAAAACCCTGGGATGTGGTGACTGGAGTCACAGGAATAGCCATGACCGACACCAC |
| | ACCGTATGGTCAGCAAAGAGTTTTCAAGGAAAAAGTGGACACTAGGGTGCCAGACCCCCAAGAAGGC |
| | ACTCGTCAGGTTATGAGCATGGTCTCTTCCTGGTTGTGGAAAGAGCTAGGCAAACACAAACGGCCAC |
| | GAGTCTGTACCAAAGAAGAGTTCATCAACAAGGTTCGTAGCAATGCAGCATTAGGGGCAATATTTGA |
| | AGAGGAAAAAGAGTGGAAGACTGCAGTGGAAGCTGTGAACGATCCAAGGTTCTGGGCTCTAGTGGAC |
| | AAGGAAAGAGAGCACCACCTGAGAGGAGAGTGCCAGAGTTGTGTGTACAACATGATGGGAAAAAGAG |
| | AAAAGAAACAAGGGGAATTTGGAAAGGCCAAGGGCAGCCGCGCCATCTGGTATATGTGGCTAGGGGC |
| | TAGATTTCTAGAGTTCGAAGCCCTTGGATTCTTGAACGAGGATCACTGGATGGGGAGAGAGAACTCA |
| | GGAGGTGGTGTTGAAGGGCTGGGATTACAAAGACTCGGATATGTCCTAGAAGAGATGAGTCGCATAC |
| | CAGGAGGAAGGATGTATGCAGATGACACTGCTGGCTGGGACACCCGCATCAGCAGGTTCGATCTGGA |
| | GAATGAAGCTCTAATCACCAACCAAATGGAGAAAGGGCATAGGGCCTTGGCATTGGCCATAATCAAG |
| | TACACATACCAAAACAAAGTGGTAAAGGTCCTTAGACCAGCTGAAAAAGGGAAAACAGTTATGGACA |
| | TTATTTCGAGACAAGACCAAAGGGGGAGCGGACAAGTTGTCACTTACGCTCTTAACACATTTACCAA |
| | CCTAGTGGTGCAACTCATTCGGAATATGGAGGCTGAGGAAGTTCTAGAGATGCAAGACTTGTGGCTG |
| | CTGCGGAGGTCAGAGAAAGTGACCAACTGGTTGCAGAGCAACGGATGGGATAGGCTCAAACGAATGG |
| | CAGTCAGTGGAGATGATTGCGTTGTGAAGCCAATTGATGATAGGTTTGCACATGCCCTCAGGTTCTT |
| | GAATGATATGGGAAAAGTTAGGAAGGACACACAAGAGTGGAAACCCTCAACTGGATGGGACAACTGG |
| | GAAGAAGTTCCGTTTTGCTCCCACCACTTCAACAAGCTCCATCTCAAGGACGGGAGGTCCATTGTGG |
| | TTCCCTGCCGCCACCAAGATGAACTGATTGGCCGGGCCCGCGTCTCTCCAGGGGCGGGATGGAGCAT |
| | CCGGGAGACTGCTTGCCTAGCAAAATCATATGCGCAAATGTGGCAGCTCCTTTATTTCCACAGAAGG |
| | GACCTCCGACTGATGGCCAATGCCATTTGTTCATCTGTGCCAGTTGACTGGGTTCCAACTGGGAGAA |
| | CTACCTGGTCAATCCATGGAAAGGGAGAATGGATGACCACTGAAGACATGCTTGTGGTGTGGAACAG |
| | AGTGTGGATTGAGGAGAACGACCACATGGAAGACAAGACCCCAGTTACGAAATGGACAGACATTCCC |
| | TATTTGGGAAAAAGGGAAGACTTGTGGTGTGGATCTCTCATAGGGCACAGACCGCGCACCACCTGGG |
| | GTGAGAACATTAAAAACACAGTCAACATGGTGCGCAGGATCATAGGTGATGAAGAAAAGTACATGGA |
| | CTACCTATCCACCCAAGTTCGCTACTTGGGTGAAGAAGGGTCTACACCTGGAGTGCTGTAAGCACCA |
| | ATCTTAATGTTGTCAGGCCTGCTAGTCAGCCACAGCTTGGGGAAAGCTGTGCAGCCTGTGACCCCCC |
| | CAGGAGAAGCTGGGAAACCAAGCCTATAGTCAGGCCGAGAACGCCATGGCACGGAAGAAGCCATGCT |
| | GCCTGTGAGCCCCTCAGAGGACACTGAGTCAAAAAACCCCATGCGCTTGGAGGCGCAGGATGGGAAA |
| | AGAAGGTGGCGACCTTCCCCACCCTTCAATCTGGGGCCTGAACTGGAGATCAGCTGTGGATCTCCAG |
| | AAGAGGGACTAGTGGTTAGAGGAGACCCCCCGGAAAACGCAAAACAGCATATTGACGCTGGGAAAGA |
| | CCAGAGACTCCATGAGTTTCCACCACGCTGGCCGCCAGGCACAGATCGCCGAATAGCGGCGGCCGGT |
| | GTGGGGAAATCCATGGGTCTT |
| 300 | GenBank Accession No. AB047639.1 (Hepatitis C virus (isolate JFH-1) genomic |
| | RNA, complete genome) |
| | ACCTGCCCCTAATAGGGGCGACACTCCGCCATGAATCACTCCCCTGTGAGGAACTACTGTCTTCACG |
| | CAGAAAGCGCCTAGCCATGGCGTTAGTATGAGTGTCGTACAGCCTCCAGGCCCCCCCCTCCCGGGAG |
| | AGCCATAGTGGTCTGCGGAACCGGTGAGTACACCGGAATTGCCGGGAAGACTGGGTCCTTTCTTGGA |
| | TAAACCCACTCTATGCCCGGCCATTTGGGCGTGCCCCCGCAAGACTGCTAGCCGAGTAGCGTTGGGT |
| | TGCGAAAGGCCTTGTGGTACTGCCTGATAGGGCGCTTGCGAGTGCCCCGGGAGGTCTCGTAGACCGT |
| | GCACCATGAGCACAAATCCTAAACCTCAAAGAAAAACCAAAAGAAACACCAACCGTCGCCCAGAAGA |
| | CGTTAAGTTCCCGGGCGGCGGCCAGATCGTTGGCGGAGTATACTTGTTGCCGCGCAGGGGCCCCAGG |
| | TTGGGTGTGCGCACGACAAGGAAAACTTCGGAGCGGTCCCAGCCACGTGGGAGACGCCAGCCCATCC |
| | CCAAAGATCGGCGCTCCACTGGCAAGGCCTGGGGAAAACCAGGTCGCCCCTGGCCCCTATATGGGAA |
| | TGAGGGACTCGGCTGGGCAGGATGGCTCCTGTCCCCCCGAGGCTCTCGCCCCTCCTGGGGCCCCACT |
| | GACCCCCGGCATAGGTCGCGCAACGTGGGTAAAGTCATCGACACCCTAACGTGTGGCTTTGCCGACC |
| | TCATGGGGTACATCCCCGTCGTAGGCGCCCCGCTTAGTGGCGCCGCCAGAGCTGTCGCGCACGGCGT |
| | GAGAGTCCTGGAGGACGGGGTTAATTATGCAACAGGGAACCTACCCGGTTTCCCCTTTTCTATCTTC |
| | TTGCTGGCCCTGTTGTCCTGCATCACCGTTCCGGTCTCTGCTGCCCAGGTGAAGAATACCAGTAGCA |
| | GCTACATGGTGACCAATGACTGCTCCAATGACAGCATCACTTGGCAGCTCGAGGCTGCGGTTCTCCA |
| | CGTCCCCGGGTGCGTCCCGTGCGAGAGAGTGGGGAATACGTCACGGTGTTGGGTGCCAGTCTCGCCA |
| | AACATGGCTGTGCGGCAGCCCGGTGCCCTCACGCAGGGTCTGCGGACGCACATCGATATGGTTGTGA |
| | TGTCCGCCACCTTCTGCTCTGCTCTCTACGTGGGGGACCTCTGTGGCGGGGTGATGCTCGCGGCCCA |
| | GGTGTTCATCGTCTCGCCGCAGTACCACTGGTTTGTGCAAGAATGCAATTGCTCCATCTACCCTGGC |
| | ACCATCACTGGACACCGCATGGCATGGGACATGATGATGAACTGGTCGCCCACGGCCACCATGATCC |
| | TGGCGTACGTGATGCGCGTCCCCGAGGTCATCATAGACATCGTTAGCGGGGCTCACTGGGGCGTCAT |
| | GTTCGGCTTGGCCTACTTCTCTATGCAGGGAGCGTGGGCGAAGGTCATTGTCATCCTTCTGCTGGCC |
| | GCTGGGGTGGACGCGGGCACCACCACCGTTGGAGGCGCTGTTGCACGTTCCACCAACGTGATTGCCG |
| | GCGTGTTCAGCCATGGCCCTCAGCAGAACATTCAGCTCATTAACACCAACGGCAGTTGGCACATCAA |
| | CCGTACTGCCTTGAATTGCAATGACTCCTTGAACACCGGCTTTCTCGCGGCCTTGTTCTACACCAAC |
| | CGCTTTAACTCGTCAGGGTGTCCAGGGCGCCTGTCCGCCTGCCGCAACATCGAGGCTTTCCGGATAG |
| | GGTGGGGCACCCTACAGTACGAGGATAATGTCACCAATCCAGAGGATATGAGGCCGTACTGCTGGCA |
| | CTACCCCCCAAAGCCGTGTGGCGTAGTCCCCGCGAGGTCTGTGTGTGGCCCAGTGTACTGTTTCACC |
| | CCCAGCCCGGTAGTAGTGGGCACGACCGACAGACGTGGAGTGCCCACCTACACATGGGGAGAGAATG |
| | AGACAGATGTCTTCCTACTGAACAGCACCCGACCGCCGCAGGGCTCATGGTTCGGCTGCACGTGGAT |
| | GAACTCCACTGGTTTCACCAAGACTTGTGGCGCGCCACCTTGCCGCACCAGAGCTGACTTCAACGCC |
| | AGCACGGACTTGTTGTGCCCTACGGATTGTTTTAGGAAGCATCCTGATGCCACTTATATTAAGTGTG |
| | GTTCTGGGCCCTGGCTCACACCAAAGTGCCTGGTCCACTACCCTTACAGACTCTGGCATTACCCCTG |
| | CACAGTCAATTTTACCATCTTCAAGATAAGAATGTATGTAGGGGGGGTTGAGCACAGGCTCACGGCC |
| | GCATGCAACTTCACTCGTGGGGATCGCTGCGACTTGGAGGACAGGGACAGGAGTCAGCTGTCTCCTC |
| | TGTTGCACTCTACCACGGAATGGGCCATCCTGCCCTGCACCTACTCAGACTTACCCGCTTTGTCAAC |
| | TGGTCTTCTCCACCTTCACCAGAACATCGTGGACGTACAATACATGTATGGCCTCTCACCTGCTATC |
| | ACAAAATACGTCGTTCGATGGGAGTGGGTGGTACTCTTATTCCTGCTCTTAGCGGACGCCAGAGTCT |
| | GCGCCTGCTTGTGGATGCTCATCTTGTTGGGCCAGGCCGAAGCAGCATTGGAGAAGTTGGTCGTCTT |
| | GCACGCTGCGAGTGCGGCTAACTGCCATGGCCTCCTATATTTTGCCATCTTCTTCGTGGCAGCTTGG |
| | CACATCAGGGGTCGGGTGGTCCCCTTGACCACCTATTGCCTCACTGGCCTATGGCCCTTCTGCCTAC |
| | TGCTCATGGCACTGCCCCGGCAGGCTTATGCCTATGACGCACCTGTGCACGGACAGATAGGCGTGGG |
| | TTTGTTGATATTGATCACCCTCTTCACACTCACCCCGGGGTATAAGACCCTCCTCGGCCAGTGTCTG |
| | TGGTGGTTGTGCTATCTCCTGACCCTGGGGGAAGCCATGATTCAGGAGTGGGTACCACCCATGCAGG |
| | TGCGCGGCGGCCGCGATGGCATCGCGTGGGCCGTCACTATATTCTGCCCGGGTGTGGTGTTTGACAT |
| | TACCAAATGGCTTTTGGCGTTGCTTGGGCCTGCTTACCTCTTAAGGGCCGCTTTGACACATGTGCCG |
| | TACTTCGTCAGAGCTCACGCTCTGATAAGGGTATGCGCTTTGGTGAAGCAGCTCGCGGGGGGTAGGT |
| | ATGTTCAGGTGGCGCTATTGGCCCTTGGCAGGTGGACTGGCACCTACATCTATGACCACCTCACACC |
| | TATGTCGGACTGGGCCGCTAGCGGCCTGCGCGACTTAGCGGTCGCCGTGGAACCCATCATCTTCAGT |
| | CCGATGGAGAAGAAGGTCATCGTCTGGGGAGCGGAGACGGCTGCATGTGGGGACATTCTACATGGAC |
| | TTCCCGTGTCCGCCCGACTCGGCCAGGAGATCCTCCTCGGCCCAGCTGATGGCTACACCTCCAAGGG |
| | GTGGAAGCTCCTTGCTCCCATCACTGCTTATGCCCAGCAAACACGAGGCCTCCTGGGCGCCATAGTG |
| | GTGAGTATGACGGGGCGTGACAGGACAGAACAGGCCGGGGAAGTCCAAATCCTGTCCACAGTCTCTC |
| | AGTCCTTCCTCGGAACAACCATCTCGGGGGTTTTGTGGACTGTTTACCACGGAGCTGGCAACAAGAC |
| | TCTAGCCGGCTTACGGGGTCCGGTCACGCAGATGTACTCGAGTGCTGAGGGGGACTTGGTAGGCTGG |
| | CCCAGCCCCCCTGGGACCAAGTCTTTGGAGCCGTGCAAGTGTGGAGCCGTCGACCTATATCTGGTCA |
| | CGCGGAACGCTGATGTCATCCCGGCTCGGAGACGCGGGGACAAGCGGGGAGCATTGCTCTCCCCGAG |
| | ACCCATTTCGACCTTGAAGGGGTCCTCGGGGGGGCCGGTGCTCTGCCCTAGGGGCCACGTCGTTGGG |
| | CTCTTCCGAGCAGCTGTGTGCTCTCGGGGCGTGGCCAAATCCATCGATTTCATCCCCGTTGAGACAC |
| | TCGACGTTGTTACAAGGTCTCCCACTTTCAGTGACAACAGCACGCCACCGGCTGTGCCCCAGACCTA |
| | TCAGGTCGGGTACTTGCATGCTCCAACTGGCAGTGGAAAGAGCACCAAGGTCCCTGTCGCGTATGCC |
| | GCCCAGGGGTACAAAGTACTAGTGCTTAACCCCTCGGTAGCTGCCACCCTGGGGTTTGGGGCGTACC |
| | TATCCAAGGCACATGGCATCAATCCCAACATTAGGACTGGAGTCAGGACCGTGATGACCGGGGAGGC |
| | CATCACGTACTCCACATATGGCAAATTTCTCGCCGATGGGGGCTGCGCTAGCGGCGCCTATGACATC |
| | ATCATATGCGATGAATGCCACGCTGTGGATGCTACCTCCATTCTCGGCATCGGAACGGTCCTTGATC |
| | AAGCAGAGACAGCCGGGGTCAGACTAACTGTGCTGGCTACGGCCACACCCCCCGGGTCAGTGACAAC |
| | CCCCCATCCCGATATAGAAGAGGTAGGCCTCGGGCGGGAGGGTGAGATCCCCTTCTATGGGAGGGCG |
| | ATTCCCCTATCCTGCATCAAGGGAGGGAGACACCTGATTTTCTGCCACTCAAAGAAAAAGTGTGACG |
| | AGCTCGCGGCGGCCCTTCGGGGCATGGGCTTGAATGCCGTGGCATACTATAGAGGGTTGGACGTCTC |
| | CATAATACCAGCTCAGGGAGATGTGGTGGTCGTCGCCACCGACGCCCTCATGACGGGGTACACTGGA |
| | GACTTTGACTCCGTGATCGACTGCAATGTAGCGGTCACCCAAGCTGTCGACTTCAGCCTGGACCCCA |
| | CCTTCACTATAACCACACAGACTGTCCCACAAGACGCTGTCTCACGCAGTCAGCGCCGCGGGCGCAC |
| | AGGTAGAGGAAGACAGGGCACTTATAGGTATGTTTCCACTGGTGAACGAGCCTCAGGAATGTTTGAC |
| | AGTGTAGTGCTTTGTGAGTGCTACGACGCAGGGGCTGCGTGGTACGATCTCACACCAGCGGAGACCA |
| | CCGTCAGGCTTAGAGCGTATTTCAACACGCCCGGCCTACCCGTGTGTCAAGACCATCTTGAATTTTG |
| | GGAGGCAGTTTTCACCGGCCTCACACACATAGACGCCCACTTCCTCTCCCAAACAAAGCAAGCGGGG |
| | GAGAACTTCGCGTACCTAGTAGCCTACCAAGCTACGGTGTGCGCCAGAGCCAAGGCCCCTCCCCCGT |
| | CCTGGGACGCCATGTGGAAGTGCCTGGCCCGACTCAAGCCTACGCTTGCGGGCCCCACACCTCTCCT |
| | GTACCGTTTGGGCCCTATTACCAATGAGGTCACCCTCACACACCCTGGGACGAAGTACATCGCCACA |
| | TGCATGCAAGCTGACCTTGAGGTCATGACCAGCACGTGGGTCCTAGCTGGAGGAGTCCTGGCAGCCG |
| | TCGCCGCATATTGCCTGGCGACTGGATGCGTTTCCATCATCGGCCGCTTGCACGTCAACCAGCGAGT |
| | CGTCGTTGCGCCGGATAAGGAGGTCCTGTATGAGGCTTTTGATGAGATGGAGGAATGCGCCTCTAGG |
| | GCGGCTCTCATCGAAGAGGGGCAGCGGATAGCCGAGATGTTGAAGTCCAAGATCCAAGGCTTGCTGC |
| | AGCAGGCCTCTAAGCAGGCCCAGGACATACAACCCGCTATGCAGGCTTCATGGCCCAAAGTGGAACA |
| | ATTTTGGGCCAGACACATGTGGAACTTCATTAGCGGCATCCAATACCTCGCAGGATTGTCAACACTG |
| | CCAGGGAACCCCGCGGTGGCTTCCATGATGGCATTCAGTGCCGCCCTCACCAGTCCGTTGTCGACCA |
| | GTACCACCATCCTTCTCAACATCATGGGAGGCTGGTTAGCGTCCCAGATCGCACCACCCGCGGGGGC |
| | CACCGGCTTTGTCGTCAGTGGCCTGGTGGGGGCTGCCGTGGGCAGCATAGGCCTGGGTAAGGTGCTG |
| | GTGGACATCCTGGCAGGATATGGTGCGGGCATTTCGGGGGCCCTCGTCGCATTCAAGATCATGTCTG |
| | GCGAGAAGCCCTCTATGGAAGATGTCATCAATCTACTGCCTGGGATCCTGTCTCCGGGAGCCCTGGT |
| | GGTGGGGGTCATCTGCGCGGCCATTCTGCGCCGCCACGTGGGACCGGGGGAGGGCGCGGTCCAATGG |
| | ATGAACAGGCTTATTGCCTTTGCTTCCAGAGGAAACCACGTCGCCCCTACTCACTACGTGACGGAGT |
| | CGGATGCGTCGCAGCGTGTGACCCAACTACTTGGCTCTCTTACTATAACCAGCCTACTCAGAAGACT |
| | CCACAATTGGATAACTGAGGACTGCCCCATCCCATGCTCCGGATCCTGGCTCCGCGACGTGTGGGAC |
| | TGGGTTTGCACCATCTTGACAGACTTCAAAAATTGGCTGACCTCTAAATTGTTCCCCAAGCTGCCCG |
| | GCCTCCCCTTCATCTCTTGTCAAAAGGGGTACAAGGGTGTGTGGGCCGGCACTGGCATCATGACCAC |
| | GCGCTGCCCTTGCGGCGCCAACATCTCTGGCAATGTCCGCCTGGGCTCTATGAGGATCACAGGGCCT |
| | AAAACCTGCATGAACACCTGGCAGGGGACCTTTCCTATCAATTGCTACACGGAGGGCCAGTGCGCGC |
| | CGAAACCCCCCACGAACTACAAGACCGCCATCTGGAGGGTGGCGGCCTCGGAGTACGCGGAGGTGAC |
| | GCAGCATGGGTCGTACTCCTATGTAACAGGACTGACCACTGACAATCTGAAAATTCCTTGCCAACTA |
| | CCTTCTCCAGAGTTTTTCTCCTGGGTGGACGGTGTGCAGATCCATAGGTTTGCACCCACACCAAAGC |
| | CGTTTTTCCGGGATGAGGTCTCGTTCTGCGTTGGGCTTAATTCCTATGCTGTCGGGTCCCAGCTTCC |
| | CTGTGAACCTGAGCCCGACGCAGACGTATTGAGGTCCATGCTAACAGATCCGCCCCACATCACGGCG |
| | GAGACTGCGGCGCGGCGCTTGGCACGGGGATCACCTCCATCTGAGGCGAGCTCCTCAGTGAGCCAGC |
| | TATCAGCACCGTCGCTGCGGGCCACCTGCACCACCCACAGCAACACCTATGACGTGGACATGGTCGA |
| | TGCCAACCTGCTCATGGAGGGCGGTGTGGCTCAGACAGAGCCTGAGTCCAGGGTGCCCGTTCTGGAC |
| | TTTCTCGAGCCAATGGCCGAGGAAGAGAGCGACCTTGAGCCCTCAATACCATCGGAGTGCATGCTCC |
| | CCAGGAGCGGGTTTCCACGGGCCTTACCGGCTTGGGCACGGCCTGACTACAACCCGCCGCTCGTGGA |
| | ATCGTGGAGGAGGCCAGATTACCAACCGCCCACCGTTGCTGGTTGTGCTCTCCCCCCCCCCAAGAAG |
| | GCCCCGACGCCTCCCCCAAGGAGACGCCGGACAGTGGGTCTGAGCGAGAGCACCATATCAGAAGCCC |
| | TCCAGCAACTGGCCATCAAGACCTTTGGCCAGCCCCCCTCGAGCGGTGATGCAGGCTCGTCCACGGG |
| | GGCGGGCGCCGCCGAATCCGGCGGTCCGACGTCCCCTGGTGAGCCGGCCCCCTCAGAGACAGGTTCC |
| | GCCTCCTCTATGCCCCCCCTCGAGGGGGAGCCTGGAGATCCGGACCTGGAGTCTGATCAGGTAGAGC |
| | TTCAACCTCCCCCCCAGGGGGGGGGGGTAGCTCCCGGTTCGGGCTCGGGGTCTTGGTCTACTTGCTC |
| | CGAGGAGGACGATACCACCGTGTGCTGCTCCATGTCATACTCCTGGACCGGGGCTCTAATAACTCCC |
| | TGTAGCCCCGAAGAGGAAAAGTTGCCAATCAACCCTTTGAGTAACTCGCTGTTGCGATACCATAACA |
| | AGGTGTACTGTACAACATCAAAGAGCGCCTCACAGAGGGCTAAAAAGGTAACTTTTGACAGGACGCA |
| | AGTGCTCGACGCCCATTATGACTCAGTCTTAAAGGACATCAAGCTAGCGGCTTCCAAGGTCAGCGCA |
| | AGGCTCCTCACCTTGGAGGAGGCGTGCCAGTTGACTCCACCCCATTCTGCAAGATCCAAGTATGGAT |
| | TCGGGGCCAAGGAGGTCCGCAGCTTGTCCGGGAGGGCCGTTAACCACATCAAGTCCGTGTGGAAGGA |
| | CCTCCTGGAAGACCCACAAACACCAATTCCCACAACCATCATGGCCAAAAATGAGGTGTTCTGCGTG |
| | GACCCCGCCAAGGGGGGTAAGAAACCAGCTCGCCTCATCGTTTACCCTGACCTCGGCGTCCGGGTCT |
| | GCGAGAAAATGGCCCTCTATGACATTACACAAAAGCTTCCTCAGGCGGTAATGGGAGCTTCCTATGG |
| | CTTCCAGTACTCCCCTGCCCAACGGGTGGAGTATCTCTTGAAAGCATGGGCGGAAAAGAAGGACCCC |
| | ATGGGTTTTTCGTATGATACCCGATGCTTCGACTCAACCGTCACTGAGAGAGACATCAGGACCGAGG |
| | AGTCCATATACCAGGCCTGCTCCCTGCCCGAGGAGGCCCGCACTGCCATACACTCGCTGACTGAGAG |
| | ACTTTACGTAGGAGGGCCCATGTTCAACAGCAAGGGTCAAACCTGCGGTTACAGACGTTGCCGCGCC |
| | AGCGGGGTGCTAACCACTAGCATGGGTAACACCATCACATGCTATGTGAAAGCCCTAGCGGCCTGCA |
| | AGGCTGCGGGGATAGTTGCGCCCACAATGCTGGTATGCGGCGATGACCTAGTAGTCATCTCAGAAAG |
| | CCAGGGGACTGAGGAGGACGAGCGGAACCTGAGAGCCTTCACGGAGGCCATGACCAGGTACTCTGCC |
| | CCTCCTGGTGATCCCCCCAGACCGGAATATGACCTGGAGCTAATAACATCCTGTTCCTCAAATGTGT |
| | CTGTGGCGTTGGGCCCGCGGGGCCGCCGCAGATACTACCTGACCAGAGACCCAACCACTCCACTCGC |
| | CCGGGCTGCCTGGGAAACAGTTAGACACTCCCCTATCAATTCATGGCTGGGAAACATCATCCAGTAT |
| | GCTCCAACCATATGGGTTCGCATGGTCCTAATGACACACTTCTTCTCCATTCTCATGGTCCAAGACA |
| | CCCTGGACCAGAACCTCAACTTTGAGATGTATGGATCAGTATACTCCGTGAATCCTTTGGACCTTCC |
| | AGCCATAATTGAGAGGTTACACGGGCTTGACGCCTTTTCTATGCACACATACTCTCACCACGAACTG |
| | ACGCGGGTGGCTTCAGCCCTCAGAAAACTTGGGGCGCCACCCCTCAGGGTGTGGAAGAGTCGGGCTC |
| | GCGCAGTCAGGGCGTCCCTCATCTCCCGTGGAGGGAAAGCGGCCGTTTGCGGCCGATATCTCTTCAA |
| | TTGGGCGGTGAAGACCAAGCTCAAACTCACTCCATTGCCGGAGGCGCGCCTACTGGACTTATCCAGT |
| | TGGTTCACCGTCGGCGCCGGCGGGGGCGACATTTTTCACAGCGTGTCGCGCGCCCGACCCCGCTCAT |
| | TACTCTTCGGCCTACTCCTACTTTTCGTAGGGGTAGGCCTCTTCCTACTCCCCGCTCGGTAGAGCGG |
| | CACACACTAGGTACACTCCATAGCTAACTGTTCCTTTTTTTTTTTTTTTTTTTTTTTTTTTTTTTTT |
| | TTTTTTTTTTCTTTTTTTTTTTTTTCCCTCTTTCTTCCCTTCTCATCTTATTCTACTTTCTTTCTTG |
| | GTGGCTCCATCTTAGCCCTAGTCACGGCTAGCTGTGAAAGGTCCGTGAGCCGCATGACTGCAGAGAG |
| | TGCCGTAACTGGTCTCTCTGCAGATCATGT |
| 301 | GenBank Accession No. NC_004102.1 (Hepatitis C virus genotype 1, complete |
| | genome) |
| | GCCAGCCCCCTGATGGGGGCGACACTCCACCATGAATCACTCCCCTGTGAGGAACTACTGTCTTCAC |
| | GCAGAAAGCGTCTAGCCATGGCGTTAGTATGAGTGTCGTGCAGCCTCCAGGACCCCCCCTCCCGGGA |
| | GAGCCATAGTGGTCTGCGGAACCGGTGAGTACACCGGAATTGCCAGGACGACCGGGTCCTTTCTTGG |
| | ATAAACCCGCTCAATGCCTGGAGATTTGGGCGTGCCCCCGCAAGACTGCTAGCCGAGTAGTGTTGGG |
| | TCGCGAAAGGCCTTGTGGTACTGCCTGATAGGGTGCTTGCGAGTGCCCCGGGAGGTCTCGTAGACCG |
| | TGCACCATGAGCACGAATCCTAAACCTCAAAGAAAAACCAAACGTAACACCAACCGTCGCCCACAGG |
| | ACGTCAAGTTCCCGGGTGGCGGTCAGATCGTTGGTGGAGTTTACTTGTTGCCGCGCAGGGGCCCTAG |
| | ATTGGGTGTGCGCGCGACGAGGAAGACTTCCGAGCGGTCGCAACCTCGAGGTAGACGTCAGCCTATC |
| | CCCAAGGCACGTCGGCCCGAGGGCAGGACCTGGGCTCAGCCCGGGTACCCTTGGCCCCTCTATGGCA |
| | ATGAGGGTTGCGGGTGGGCGGGATGGCTCCTGTCTCCCCGTGGCTCTCGGCCTAGCTGGGGCCCCAC |
| | AGACCCCCGGCGTAGGTCGCGCAATTTGGGTAAGGTCATCGATACCCTTACGTGCGGCTTCGCCGAC |
| | CTCATGGGGTACATACCGCTCGTCGGCGCCCCTCTTGGAGGCGCTGCCAGGGCCCTGGCGCATGGCG |
| | TCCGGGTTCTGGAAGACGGCGTGAACTATGCAACAGGGAACCTTCCTGGTTGCTCTTTCTCTATCTT |
| | CCTTCTGGCCCTGCTCTCTTGCCTGACTGTGCCCGCTTCAGCCTACCAAGTGCGCAATTCCTCGGGG |
| | CTTTACCATGTCACCAATGATTGCCCTAACTCGAGTATTGTGTACGAGGCGGCCGATGCCATCCTGC |
| | ACACTCCGGGGTGTGTCCCTTGCGTTCGCGAGGGTAACGCCTCGAGGTGTTGGGTGGCGGTGACCCC |
| | CACGGTGGCCACCAGGGACGGCAAACTCCCCACAACGCAGCTTCGACGTCATATCGATCTGCTTGTC |
| | GGGAGCGCCACCCTCTGCTCGGCCCTCTACGTGGGGGACCTGTGCGGGTCTGTCTTTCTTGTTGGTC |
| | AACTGTTTACCTTCTCTCCCAGGCGCCACTGGACGACGCAAGACTGCAATTGTTCTATCTATCCCGG |
| | CCATATAACGGGTCATCGCATGGCATGGGATATGATGATGAACTGGTCCCCTACGGCAGCGTTGGTG |
| | GTAGCTCAGCTGCTCCGGATCCCACAAGCCATCATGGACATGATCGCTGGTGCTCACTGGGGAGTCC |
| | TGGCGGGCATAGCGTATTTCTCCATGGTGGGGAACTGGGCGAAGGTCCTGGTAGTGCTGCTGCTATT |
| | TGCCGGCGTCGACGCGGAAACCCACGTCACCGGGGGAAGTGCCGGCCGCACCACGGCTGGGCTTGTT |
| | GGTCTCCTTACACCAGGCGCCAAGCAGAACATCCAACTGATCAACACCAACGGCAGTTGGCACATCA |
| | ATAGCACGGCCTTGAACTGCAATGAAAGCCTTAACACCGGCTGGTTAGCAGGGCTCTTCTATCAGCA |
| | CAAATTCAACTCTTCAGGCTGTCCTGAGAGGTTGGCCAGCTGCCGACGCCTTACCGATTTTGCCCAG |
| | GGCTGGGGTCCTATCAGTTATGCCAACGGAAGCGGCCTCGACGAACGCCCCTACTGCTGGCACTACC |
| | CTCCAAGACCTTGTGGCATTGTGCCCGCAAAGAGCGTGTGTGGCCCGGTATATTGCTTCACTCCCAG |
| | CCCCGTGGTGGTGGGAACGACCGACAGGTCGGGCGCGCCTACCTACAGCTGGGGTGCAAATGATACG |
| | GATGTCTTCGTCCTTAACAACACCAGGCCACCGCTGGGCAATTGGTTCGGTTGTACCTGGATGAACT |
| | CAACTGGATTCACCAAAGTGTGCGGAGCGCCCCCTTGTGTCATCGGAGGGGTGGGCAACAACACCTT |
| | GCTCTGCCCCACTGATTGTTTCCGCAAGCATCCGGAAGCCACATACTCTCGGTGCGGCTCCGGTCCC |
| | TGGATTACACCCAGGTGCATGGTCGACTACCCGTATAGGCTTTGGCACTATCCTTGTACCATCAATT |
| | ACACCATATTCAAAGTCAGGATGTACGTGGGAGGGGTCGAGCACAGGCTGGAAGCGGCCTGCAACTG |
| | GACGCGGGGCGAACGCTGTGATCTGGAAGACAGGGACAGGTCCGAGCTCAGCCCATTGCTGCTGTCC |
| | ACCACACAGTGGCAGGTCCTTCCGTGTTCTTTCACGACCCTGCCAGCCTTGTCCACCGGCCTCATCC |
| | ACCTCCACCAGAACATTGTGGACGTGCAGTACTTGTACGGGGTAGGGTCAAGCATCGCGTCCTGGGC |
| | CATTAAGTGGGAGTACGTCGTTCTCCTGTTCCTCCTGCTTGCAGACGCGCGCGTCTGCTCCTGCTTG |
| | TGGATGATGTTACTCATATCCCAAGCGGAGGCGGCTTTGGAGAACCTCGTAATACTCAATGCAGCAT |
| | CCCTGGCCGGGACGCACGGTCTTGTGTCCTTCCTCGTGTTCTTCTGCTTTGCGTGGTATCTGAAGGG |
| | TAGGTGGGTGCCCGGAGCGGTCTACGCCTTCTACGGGATGTGGCCTCTCCTCCTGCTCCTGCTGGCG |
| | TTGCCTCAGCGGGCATACGCACTGGACACGGAGGTGGCCGCGTCGTGTGGCGGCGTTGTTCTTGTCG |
| | GGTTAATGGCGCTGACTCTGTCGCCATATTACAAGCGCTACATCAGCTGGTGCATGTGGTGGCTTCA |
| | GTATTTTCTGACCAGAGTAGAAGCGCAACTGCACGTGTGGGTTCCCCCCCTCAACGTCCGGGGGGGG |
| | CGCGATGCCGTCATCTTACTCATGTGTGTTGTACACCCGACTCTGGTATTTGACATCACCAAACTAC |
| | TCCTGGCCATCTTCGGACCCCTTTGGATTCTTCAAGCCAGTTTGCTTAAAGTCCCCTACTTCGTGCG |
| | CGTTCAAGGCCTTCTCCGGATCTGCGCGCTAGCGCGGAAGATAGCCGGAGGTCATTACGTGCAAATG |
| | GCCATCATCAAGTTAGGGGCGCTTACTGGCACCTATGTGTATAACCATCTCACCCCTCTTCGAGACT |
| | GGGCGCACAACGGCCTGCGAGATCTGGCCGTGGCTGTGGAACCAGTCGTCTTCTCCCGAATGGAGAC |
| | CAAGCTCATCACGTGGGGGGCAGATACCGCCGCGTGCGGTGACATCATCAACGGCTTGCCCGTCTCT |
| | GCCCGTAGGGGCCAGGAGATACTGCTTGGGCCAGCCGACGGAATGGTCTCCAAGGGGTGGAGGTTGC |
| | TGGCGCCCATCACGGCGTACGCCCAGCAGACGAGAGGCCTCCTAGGGTGTATAATCACCAGCCTGAC |
| | TGGCCGGGACAAAAACCAAGTGGAGGGTGAGGTCCAGATCGTGTCAACTGCTACCCAAACCTTCCTG |
| | GCAACGTGCATCAATGGGGTATGCTGGACTGTCTACCACGGGGCCGGAACGAGGACCATCGCATCAC |
| | CCAAGGGTCCTGTCATCCAGATGTATACCAATGTGGACCAAGACCTTGTGGGCTGGCCCGCTCCTCA |
| | AGGTTCCCGCTCATTGACACCCTGCACCTGCGGCTCCTCGGACCTTTACCTGGTCACGAGGCACGCC |
| | GATGTCATTCCCGTGCGCCGGCGAGGTGATAGCAGGGGTAGCCTGCTTTCGCCCCGGCCCATTTCCT |
| | ACTTGAAAGGCTCCTCGGGGGGTCCGCTGTTGTGCCCCGCGGGACACGCCGTGGGCCTATTCAGGGC |
| | CGCGGTGTGCACCCGTGGAGTGGCTAAGGCGGTGGACTTTATCCCTGTGGAGAACCTAGAGACAACC |
| | ATGAGATCCCCGGTGTTCACGGACAACTCCTCTCCACCAGCAGTGCCCCAGAGCTTCCAGGTGGCCC |
| | ACCTGCATGCTCCCACCGGCAGCGGTAAGAGCACCAAGGTCCCGGCTGCGTACGCAGCCCAGGGCTA |
| | CAAGGTGTTGGTGCTCAACCCCTCTGTTGCTGCAACGCTGGGCTTTGGTGCTTACATGTCCAAGGCC |
| | CATGGGGTTGATCCTAATATCAGGACCGGGGTGAGAACAATTACCACTGGCAGCCCCATCACGTACT |
| | CCACCTACGGCAAGTTCCTTGCCGACGGCGGGTGCTCAGGAGGTGCTTATGACATAATAATTTGTGA |
| | CGAGTGCCACTCCACGGATGCCACATCCATCTTGGGCATCGGCACTGTCCTTGACCAAGCAGAGACT |
| | GCGGGGGCGAGACTGGTTGTGCTCGCCACTGCTACCCCTCCGGGCTCCGTCACTGTGTCCCATCCTA |
| | ACATCGAGGAGGTTGCTCTGTCCACCACCGGAGAGATCCCTTTTTACGGCAAGGCTATCCCCCTCGA |
| | GGTGATCAAGGGGGGAAGACATCTCATCTTCTGCCACTCAAAGAAGAAGTGCGACGAGCTCGCCGCG |
| | AAGCTGGTCGCATTGGGCATCAATGCCGTGGCCTACTACCGCGGTCTTGACGTGTCTGTCATCCCGA |
| | CCAGCGGCGATGTTGTCGTCGTGTCGACCGATGCTCTCATGACTGGCTTTACCGGCGACTTCGACTC |
| | TGTGATAGACTGCAACACGTGTGTCACTCAGACAGTCGATTTCAGCCTTGACCCTACCTTTACCATT |
| | GAGACAACCACGCTCCCCCAGGATGCTGTCTCCAGGACTCAACGCCGGGGCAGGACTGGCAGGGGGA |
| | AGCCAGGCATCTACAGATTTGTGGCACCGGGGGAGCGCCCCTCCGGCATGTTCGACTCGTCCGTCCT |
| | CTGTGAGTGCTATGACGCGGGCTGTGCTTGGTATGAGCTCACGCCCGCCGAGACTACAGTTAGGCTA |
| | CGAGCGTACATGAACACCCCGGGGCTTCCCGTGTGCCAGGACCATCTTGAATTTTGGGAGGGCGTCT |
| | TTACGGGCCTCACTCATATAGATGCCCACTTTCTATCCCAGACAAAGCAGAGTGGGGAGAACTTTCC |
| | TTACCTGGTAGCGTACCAAGCCACCGTGTGCGCTAGGGCTCAAGCCCCTCCCCCATCGTGGGACCAG |
| | ATGTGGAAGTGTTTGATCCGCCTTAAACCCACCCTCCATGGGCCAACACCCCTGCTATACAGACTGG |
| | GCGCTGTTCAGAATGAAGTCACCCTGACGCACCCAATCACCAAATACATCATGACATGCATGTCGGC |
| | CGACCTGGAGGTCGTCACGAGCACCTGGGTGCTCGTTGGCGGCGTCCTGGCTGCTCTGGCCGCGTAT |
| | TGCCTGTCAACAGGCTGCGTGGTCATAGTGGGCAGGATTGTCTTGTCCGGGAAGCCGGCAATTATAC |
| | CTGACAGGGAGGTTCTCTACCAGGAGTTCGATGAGATGGAAGAGTGCTCTCAGCACTTACCGTACAT |
| | CGAGCAAGGGATGATGCTCGCTGAGCAGTTCAAGCAGAAGGCCCTCGGCCTCCTGCAGACCGCGTCC |
| | CGCCAAGCAGAGGTTATCACCCCTGCTGTCCAGACCAACTGGCAGAAACTCGAGGTCTTCTGGGCGA |
| | AGCACATGTGGAATTTCATCAGTGGGATACAATACTTGGCGGGCCTGTCAACGCTGCCTGGTAACCC |
| | CGCCATTGCTTCATTGATGGCTTTTACAGCTGCCGTCACCAGCCCACTAACCACTGGCCAAACCCTC |
| | CTCTTCAACATATTGGGGGGGTGGGTGGCTGCCCAGCTCGCCGCCCCCGGTGCCGCTACCGCCTTTG |
| | TGGGCGCTGGCTTAGCTGGCGCCGCCATCGGCAGCGTTGGACTGGGGAAGGTCCTCGTGGACATTCT |
| | TGCAGGGTATGGCGCGGGCGTGGCGGGAGCTCTTGTAGCATTCAAGATCATGAGCGGTGAGGTCCCC |
| | TCCACGGAGGACCTGGTCAATCTGCTGCCCGCCATCCTCTCGCCTGGAGCCCTTGTAGTCGGTGTGG |
| | TCTGCGCAGCAATACTGCGCCGGCACGTTGGCCCGGGCGAGGGGGCAGTGCAATGGATGAACCGGCT |
| | AATAGCCTTCGCCTCCCGGGGGAACCATGTTTCCCCCACGCACTACGTGCCGGAGAGCGATGCAGCC |
| | GCCCGCGTCACTGCCATACTCAGCAGCCTCACTGTAACCCAGCTCCTGAGGCGACTGCATCAGTGGA |
| | TAAGCTCGGAGTGTACCACTCCATGCTCCGGTTCCTGGCTAAGGGACATCTGGGACTGGATATGCGA |
| | GGTGCTGAGCGACTTTAAGACCTGGCTGAAAGCCAAGCTCATGCCACAACTGCCTGGGATTCCCTTT |
| | GTGTCCTGCCAGCGCGGGTATAGGGGGGTCTGGCGAGGAGACGGCATTATGCACACTCGCTGCCACT |
| | GTGGAGCTGAGATCACTGGACATGTCAAAAACGGGACGATGAGGATCGTCGGTCCTAGGACCTGCAG |
| | GAACATGTGGAGTGGGACGTTCCCCATTAACGCCTACACCACGGGCCCCTGTACTCCCCTTCCTGCG |
| | CCGAACTATAAGTTCGCGCTGTGGAGGGTGTCTGCAGAGGAATACGTGGAGATAAGGCGGGTGGGGG |
| | ACTTCCACTACGTATCGGGTATGACTACTGACAATCTTAAATGCCCGTGCCAGATCCCATCGCCCGA |
| | ATTTTTCACAGAATTGGACGGGGTGCGCCTACATAGGTTTGCGCCCCCTTGCAAGCCCTTGCTGCGG |
| | GAGGAGGTATCATTCAGAGTAGGACTCCACGAGTACCCGGTGGGGTCGCAATTACCTTGCGAGCCCG |
| | AACCGGACGTAGCCGTGTTGACGTCCATGCTCACTGATCCCTCCCATATAACAGCAGAGGCGGCCGG |
| | GAGAAGGTTGGCGAGAGGGTCACCCCCTTCTATGGCCAGCTCCTCGGCCAGCCAGCTGTCCGCTCCA |
| | TCTCTCAAGGCAACTTGCACCGCCAACCATGACTCCCCTGACGCCGAGCTCATAGAGGCTAACCTCC |
| | TGTGGAGGCAGGAGATGGGCGGCAACATCACCAGGGTTGAGTCAGAGAACAAAGTGGTGATTCTGGA |
| | CTCCTTCGATCCGCTTGTGGCAGAGGAGGATGAGCGGGAGGTCTCCGTACCCGCAGAAATTCTGCGG |
| | AAGTCTCGGAGATTCGCCCGGGCCCTGCCCGTTTGGGCGCGGCCGGACTACAACCCCCCGCTAGTAG |
| | AGACGTGGAAAAAGCCTGACTACGAACCACCTGTGGTCCATGGCTGCCCGCTACCACCTCCACGGTC |
| | CCCTCCTGTGCCTCCGCCTCGGAAAAAGCGTACGGTGGTCCTCACCGAATCAACCCTATCTACTGCC |
| | TTGGCCGAGCTTGCCACCAAAAGTTTTGGCAGCTCCTCAACTTCCGGCATTACGGGCGACAATACGA |
| | CAACATCCTCTGAGCCCGCCCCTTCTGGCTGCCCCCCCGACTCCGACGTTGAGTCCTATTCTTCCAT |
| | GCCCCCCCTGGAGGGGGAGCCTGGGGATCCGGATCTCAGCGACGGGTCATGGTCGACGGTCAGTAGT |
| | GGGGCCGACACGGAAGATGTCGTGTGCTGCTCAATGTCTTATTCCTGGACAGGCGCACTCGTCACCC |
| | CGTGCGCTGCGGAAGAACAAAAACTGCCCATCAACGCACTGAGCAACTCGTTGCTACGCCATCACAA |
| | TCTGGTGTATTCCACCACTTCACGCAGTGCTTGCCAAAGGCAGAAGAAAGTCACATTTGACAGACTG |
| | CAAGTTCTGGACAGCCATTACCAGGACGTGCTCAAGGAGGTCAAAGCAGCGGCGTCAAAAGTGAAGG |
| | CTAACTTGCTATCCGTAGAGGAAGCTTGCAGCCTGACGCCCCCACATTCAGCCAAATCCAAGTTTGG |
| | CTATGGGGCAAAAGACGTCCGTTGCCATGCCAGAAAGGCCGTAGCCCACATCAACTCCGTGTGGAAA |
| | GACCTTCTGGAAGACAGTGTAACACCAATAGACACTACCATCATGGCCAAGAACGAGGTTTTCTGCG |
| | TTCAGCCTGAGAAGGGGGGTCGTAAGCCAGCTCGTCTCATCGTGTTCCCCGACCTGGGCGTGCGCGT |
| | GTGCGAGAAGATGGCCCTGTACGACGTGGTTAGCAAGCTCCCCCTGGCCGTGATGGGAAGCTCCTAC |
| | GGATTCCAATACTCACCAGGACAGCGGGTTGAATTCCTCGTGCAAGCGTGGAAGTCCAAGAAGACCC |
| | CGATGGGGTTCTCGTATGATACCCGCTGTTTTGACTCCACAGTCACTGAGAGCGACATCCGTACGGA |
| | GGAGGCAATTTACCAATGTTGTGACCTGGACCCCCAAGCCCGCGTGGCCATCAAGTCCCTCACTGAG |
| | AGGCTTTATGTTGGGGGCCCTCTTACCAATTCAAGGGGGGAAAACTGCGGCTACCGCAGGTGCCGCG |
| | CGAGCGGCGTACTGACAACTAGCTGTGGTAACACCCTCACTTGCTACATCAAGGCCCGGGCAGCCTG |
| | TCGAGCCGCAGGGCTCCAGGACTGCACCATGCTCGTGTGTGGCGACGACTTAGTCGTTATCTGTGAA |
| | AGTGCGGGGGTCCAGGAGGACGCGGCGAGCCTGAGAGCCTTCACGGAGGCTATGACCAGGTACTCCG |
| | CCCCCCCCGGGGACCCCCCACAACCAGAATACGACTTGGAGCTTATAACATCATGCTCCTCCAACGT |
| | GTCAGTCGCCCACGACGGCGCTGGAAAGAGGGTCTACTACCTTACCCGTGACCCTACAACCCCCCTC |
| | GCGAGAGCCGCGTGGGAGACAGCAAGACACACTCCAGTCAATTCCTGGCTAGGCAACATAATCATGT |
| | TTGCCCCCACACTGTGGGCGAGGATGATACTGATGACCCATTTCTTTAGCGTCCTCATAGCCAGGGA |
| | TCAGCTTGAACAGGCTCTTAACTGTGAGATCTACGGAGCCTGCTACTCCATAGAACCACTGGATCTA |
| | CCTCCAATCATTCAAAGACTCCATGGCCTCAGCGCATTTTCACTCCACAGTTACTCTCCAGGTGAAA |
| | TCAATAGGGTGGCCGCATGCCTCAGAAAACTTGGGGTCCCGCCCTTGCGAGCTTGGAGACACCGGGC |
| | CCGGAGCGTCCGCGCTAGGCTTCTGTCCAGAGGAGGCAGGGCTGCCATATGTGGCAAGTACCTCTTC |
| | AACTGGGCAGTAAGAACAAAGCTCAAACTCACTCCAATAGCGGCCGCTGGCCGGCTGGACTTGTCCG |
| | GTTGGTTCACGGCTGGCTACAGCGGGGGAGACATTTATCACAGCGTGTCTCATGCCCGGCCCCGCTG |
| | GTTCTGGTTTTGCCTACTCCTGCTCGCTGCAGGGGTAGGCATCTACCTCCTCCCCAACCGATGAAGG |
| | TTGGGGTAAACACTCCGGCCTCTTAGGCCATTTCCTGTTTTTTTTTTTTTTTTTTTTTTTTTTTTTT |
| | TTTTTTTTTTTTTTTTTTTTTCTTTTTTTTTTTTTTTTTCCTTTTTTTTTTTTTTTTTTTTCTTTCC |
| | TTCTTTTTTCCTTTCTTTTCCTTCCTTCTTTAATGGTGGCTCCATCTTAGCCCTAGTCACGGCTAGC |
| | TGTGAAAGGTCCGTGAGCCGCATGACTGCAGAGAGTGCTGATACTGGCCTCTCTGCAGATCATGT |
| 302 | GenBank Accession No. NC_030791.1 (Hepatitis C virus genotype 7, complete |
| | genome) |
| | GCCAGCCCCTTACGGGGCGACACTCCGCCATGAATCACTCCCCTGCGAGGAACCACTGTCCTCACGC |
| | AGAAAGCGTCTAGCCATGACGTTAGTATGAGTGTCGTACAGCCTCCAGGACCCCCCCTCCCGGGAGA |
| | GCCATAGTGGTCTGCGGAACCGGTGAGTACACCGGAATTGCCGGGAAGACTGGGTCCTTTCTTGGAT |
| | CAACCCACTCTATGCCCGGAGATTTGGGCGTGCCCCCGCGAGACTGCTAGCCGAGTAGTGTTGGGTC |
| | GCGAAAGGCCTTGTGGTACTGCCTGATAGGGTGCTTGCGAGTGCCCCGGGAGGTCTCGTAGACCGTG |
| | CACCATGAGCACGAATCCTAAACCTCAAAGATTAACCAAAAGAAACACCGTCCGTCGCCCACAGAAC |
| | GTTAAGTTCCCGGGTGGCGGGCAGATCGTTGGCGGAGTCTACTTGTTGCCGCGCAGGGGCCCTAGAT |
| | TGGGTGTGCGCGGCACTAGGAAGAGTTCGGAGCGATCGCAGCCCAGGGGAAGACGCCAACGTATCCC |
| | CAAAGCTGCCTCTTCACAGGGTAAAGCCTGGGGCAAGCCCGGGTACCCTTGGCCCCTGTATGGTAAC |
| | GAGGGCTGTGGCTGGGCAGGGTGGCTCCTGTCCCCCCGCGGCTCTCGACCTACTTGGGGCCCCACYG |
| | ACCCCCGGCACCGCTCGCGAAACCTCGGTAAGGTGATCGACACCATGACCTGCGGGTTTGCCGACCT |
| | CATGGGGTACATCCCTGTCCTAGGCGCCCCCCTAGGGGGCGTTGCCAGGGCTCTGGCACATGGTGTT |
| | AGAGTTCTGGAGGACGGGGTCAACTATGCAACAGGGAACTTGCCTGGTTGCTCCTTTTCTATCTTCY |
| | TACTAGCCCTCCTGTCATGTCTAACAGTCCCGGCATCGGCTTATGAAGTCCGCAACTCCAGTGGRGT |
| | CTATCATCTCACCAATGACTGCCCCAACGCTAGTATAGTCTATGAAACAGACAACGCCATCCTACAC |
| | GAGCCTGGGTGCGTGCCTTGCGTTCGCGAGGGTAATACTAGCAGGTGTTGGGAACCAGTGGCCCCCA |
| | CTTTGGCGGTCCGCTATCGCGGAGCGCTTACTGACGATTTGCGGACGCATATTGACCTAGTGGTGGC |
| | GTCAGCTACCCTGTGCTCCGCCTTGTACGTGGGGGACATTTGTGGAGCCATCTTCATTGCCAGCCAA |
| | GCTGTTCTCTGGAAGCCCGGGGGGGGTCGGATAGTGCAAGATTGCAATTGTTCGATCTACCCGGGCC |
| | ACGTCACCGGCCACAGGATGGCGTGGGACATGATGCAGAACTGGGCGCCGGCCTTGTCAATGGTTGC |
| | CGCTTACGCTGTGAGAGTGCCCGGTGTCATCATTACCACTGTAGCGGGCGGCCACTGGGGTGTGTTA |
| | TTTGGCCTCGCTTACTTTGGTATGGCGGGAAACTGGGCAAAGGTAATACTCATCATGCTACTCATGT |
| | CCGGCGTCGACGCGGAAACCATGGCCGTCGGGGCTAGGGCCGCTCACACCACTGGCGCCCTTGTCAG |
| | CCTGCTCAATCCAGGGCCCAGTCAGCGCCTGCAGCTGATCAACACCAATGGGTCATGGCACATCAAC |
| | CGGACCGCTTTGAACTGCAATGACTCTTTGCAGACAGGGTTCATAGCGGCCCTCTTCTACACACATA |
| | GGTTCAATTCTAGTGGCTGTCCCGAGAGGATGGCTTCTTGTAAACCTCTCAGTGACTTTGACCAGGG |
| | GTGGGGCCCGCTGTGGTACAATTCAACAGAAAGACCTTCGGACCAGCGACCCTATTGCTGGCACTAC |
| | GCGCCATCGCCGTGTGGTATTGTGCCGGCTAAGGATGTTTGCGGTCCGGTCTACTGCTTTACACCAA |
| | GCCCGGTTGTGGTGGGCACCACGGATCGCCGGGGGGTGCCCACGTATACTTGGGGTGAAAATGAGTC |
| | TGATGTCTTCYTGCTCAACAGCACAAGGCCGCCGCAAGGCAGTTGGTTTGGGTGCTCATGGATGAAC |
| | ACAACGGGGTTCACGAAGACCTGCGGAGGTCCTCCGTGCAAGATACGTCCCCAGGGTGCCCAGAGTA |
| | ACACCTCTCTCACTTGTCCCACAGACTGCTTCAGGAAACATCCGCGTGCCACATACTCCGCTTGCGG |
| | ATCTGGTCCGTGGTTGACACCTAGATGCATGGTCCATTACCCCTATAGACTGTGGCACTACCCGTGT |
| | ACAGTCAACTTCACCATACACAAAGTCAGGTTATACATAGGGGGTGTAGAACATAGGCTCGATGCAG |
| | CGTGCAATTGGACGCGGGGTGAGCGATGCGACCTGGAGGACCGAGACAGGGTGGACATGTCCCCCCT |
| | GCTCCATTCCACTACGGAGCTCGCAATACTTCCGTGTTCCTTTGTGCCGCTTCCGGCCTTATCTACG |
| | GGACTGATCCACCTGCACCAAAACATCGTTGACGCCCAGTACCTTTATGGTCTTTCTCCCGCTATAA |
| | TAAGCTGGGCCATCAGATGGGAGTGGGTAGTCCTCGTTTTCCTACTCCTGGCGGACGCGCGGATCTG |
| | CGCCTGCCTTTGGATGATGATGCTTATGGCCCAGGCTGAAGCCGCTCTGGAGAACTTGATCCACCTC |
| | AACGCGGCCAGCCTTGCGGGAACCCATGGTATCTGGTGGCTCCTTTTAGTCTTTTGTGCCTCTTGGC |
| | ATCTACGAGGCAGGGTTGTCCCTCTGGTGACGTATGGGATATGCGGGATGTGGCCCTTCTTCCTCAT |
| | GTTGCTGAGCCTCCCCCCACGAGCGTATGCTCTGGACAGGGAAGTGAGCGCAGCGTTGGGAACGGGC |
| | ATGCTCGCCATCATCCTATTAGTTACCTTGGGACCGCACTACAAGAGACTTCTAGCCCTTATTCTCT |
| | GGTGGGTCACATATTTCCTTACAAGGTGTGAAGCAGCACTCCAAACGTGGGTCCCTCCTCTCAACCC |
| | TCGGGGGGGCAGGGACGGTTTCATCCTGTGTGTGCTGCTGTGCTATCCAGGCCTTGTCTTTGACATC |
| | ACAAAATGGTTGCTGGTCATGATGTGCCCTCTCTACCTCCTCCAGTTGTGTTTGGTGAGGACTCCAT |
| | ACTTTGTGAGGGCCCAGGCCCTCATCAGAGTGTGTTCTCTCTTCAAAACGCTAGCTGGGGGACGGTA |
| | CGTGCAGGCCGCGCTGCTCACTATTGGCCGCTGGACCGGCACTTATATTTATAACCATCTCGCCCCC |
| | CTGGAAACATGGGCCGCCGGCGGCCTACGGGATTTGGCCGTTGCAGTCGAGCCCGTGATATTCTCCC |
| | CCATGGAGAAGAAGATCATAGTTTGGGGGGCGGAGACCACTGCTTGTGGCGACATTCTTTGTGGCCT |
| | GCCTGTCTCAGCTCGGCTCGGCAGGGAAGTCCTGCTAGGGCCCGCGGATGACTACAGGTCCATGGGA |
| | TGGCAACTCCTGGCTCCAATCTCAGCATACGCACAGCAGACCCGCGGTCTCATCTCTACCCTTGTCG |
| | TGAGCCTCACTGGCCGTGATAAGAACGAGACTGCCGGCGAGGTGCAGGTGTTGTCCACCTCAACGCA |
| | GACCTTCCTGGGGACCAATGTGGGCGGTGTCATGTGGGGACCTTATCACGGAGCGGGCACGCGGACT |
| | GTGGCCGGCCGGGGTGGGCCTGTCCTCCAGATGTACACGTCAGTCAGTGACGATCTGGTGGGCTGGC |
| | CTGCCCCGCCTGGCTCCAAGTCCCTCGAGCCCTGCTCGTGCGGGTCAGCAGACCTTTACTTGGTGAC |
| | GCGCAATGCTGACGTCCTTCCTCTTAGGAGGAAGGGTGACGGTACAGCGTCCCTACTGTCCCCGCGC |
| | CCTGTGTCCTCCCTTAAAGGCTCCTCGGGAGGGCCTGTCTTGTGCCCCCAAAGTCATTGCGTTGGCA |
| | TCTTCAGAGCTGCTGTCTGCACCCGCGGTGTAGCCAAAGCAGTTCAGTTTGTTCCCATCGAGAAGAT |
| | GCAGGTGGCCCAGAGGTCGCCATCATTCAGTGACAATAGCACCCCTCCAGCGGTGCCCAGCACCTAT |
| | CAAGTAGGCTATTTACATGCCCCCACTGGCAGCGGCAAGAGCACTAAGGTCCCTGCGGCGTATGCCA |
| | GCCAGGGCTACAAAGTGCTCGTGCTTAATCCATCAGTCGCGGCCACCCTTGGGTTTGGTGCCTACAT |
| | GTCCAAGGCTTATGGAATTGATCCAAGTGTGCGCACCGGCGCGCGCACGGTGACCACGGGGGCTCCC |
| | ATAACTTACTCAACCTATGGGAAGTTCCTTGCCGACGGGGGTTGTTCAGGTGGTGCCTATGATATAA |
| | TCATATGTGATGAATGCCATGCCATCGATGCTACCACCGTGGTCGGCATAGGCACCGTGTTGGACCA |
| | GGCAGAGACTAGTGGTGTCCGACTTGTGGTGCTAGCTACGGCCACCCCCCCCGGAAGCGTTACGGTG |
| | CCCCACCCCAACATCGAGGAGGTCGCCCTTGGCAACGATGGGGAAATTCCCTTCTATGGGAAAGCCA |
| | TCCCCCTGCAACACATCAAGGGGGGAAGGCATCTCATTTTCTGTCATTCCAAAAAGAAATGTGATGA |
| | GCTTGCCGGGAAGCTCACCTCATTGGGGCTGACTGCCGTTGCTTACTATAGGGGGTTGGATGTTTCG |
| | GTGATCCCAACGTCTGGCGATGTAGTCGTGGTGGCTACTGATGCCTTGATGACGGGCTTTACCGGAG |
| | ACTTCGACTCCGTCATAGACTGCAACGTGGCGGTTACCCAGACTGTAGACTTCTCCTTGGACCCCAC |
| | CTTCACTATTGAGACCACCACAGTCCCGCAAGATTCTGTCTCGCGCTCTCAGAGACGTGGGAGGACA |
| | GGTAGGGGCAGGCTTGGCATCTACAGATACGTGTCCAGTGGCGAGCGGCCATCCGGTATGTTCGACA |
| | CCAGCGTGCTCTGTGAGTGCTATGACCTGGGGTGCTCGTGGTATGAACTAACGCCCAGTGAAACCAC |
| | CACGCGCCTCAGAGCCTACCTCAATTGCCCTGGTCTTCCAGTGTGCCAAGACCATCTGGAGTTCTGG |
| | GAGGGCGTCTTTACGGGACTTACTCATATTGATGCACACTTCCTGTCCCAGACCAAACAAGAGGGCC |
| | AAAATTATGCGTACCTGACTGCATACCAAGCTACAGTGTGCGCCCGGGCGAAAGCCCCCCCGCCCTC |
| | CTGGGACGTCCAGTGGAAGTGTCTCCAAAGACTAAAGCCACTGTTAGTAGGGCCCACGCCCTTGCTA |
| | TACAGGCTAGGCAGTGTTACCAATGAAGTCACATTCACTCATCCCATCACCAAATACATTGCCACGT |
| | GCATGGCTGCCGACTTGGAGGTCACTACGAGCACCTGGGTGATCGTAGGTGGCGTCCTCGCCGCCGT |
| | GGCCGCATATTGCATGTCTACTGGCAGTGTTGTTGTGGTTGGCCGTGTGGTCCTTGGATCCAACGTG |
| | GTGACGGCCCCCGACAGAGAGGTTTTATACCAGCACTTTGATGAGATGGAAGAGTGCTCCAAAGCTC |
| | CTGAATTGCTGAAACACGCCCAAACCATCGGCGGAATGTTCAAGGACAAGGCCCTCGCCGTCTTGGA |
| | TACGCTCAAGCCGGCCGCCCAGGCTGCTGTTCCCATTGTGGAGACCAACTTCCAAAAGGTGGAGAAG |
| | CTGTGGAATCAGCATATGTGGAACTTCATAAGCGGCATTCAATACCTAGCTGGGCTATCCACACTGC |
| | CAGGTAATCCAACTGTGGCCTCACTGATGGCCTTCACCGCCTCAGTTACTAGCCCCCTTGCTACATC |
| | GACCACACTACTAGTCAACATCCTGGGTGGGTGGTTCGCAAGCCAGTTAGCGCCGCCGTCTGCTGCC |
| | ACGACTTTCGTGGTCTCGGGCCTCGCAGGGGCGGCAGTGGGTAGTGTTGGCTTGGGCAAGGTCTTAG |
| | TTGATGTCCTGGCCGGCTATGGCGCCGGCATAGCTGGCGCCCTGGTGGCCTTCAAAATCATGTCTGG |
| | AGAGGTCCCTAGCACAGAGGATCTGGCAAACCTCTTACCTGCCATACTCTCACCTGGAGCTTTAGTT |
| | GTGGGAGTTGTTTGTGCCGCGATCATCAAACGGCATACCGGCACTAGTGAGGGAGTCACGCAGTGGA |
| | TGAACCGTCTCATTGCGTTCGCCTCCCGTGGAAATCACGTGTCGCCGACCCACTACATACAGGATGA |
| | TGATGCGTCAAAACGCGTCATGGGGATACTCAGCTCCCTTACCATCACCAGCCTCATAAAACGAGTA |
| | CTGGCCTGGGCGCAGACTGAYTATTCTGCGCCCTGTGCCGGGAGCTGGCTCCGGGAGGTGTGGGACT |
| | GGGTTTGCATGGTCCTATCCGACTTTGCATCTTGGTTGAAGGCCAAGGTACTTCCCAGCCTTCCAGG |
| | GATCCCATTCCTATCCTGTCAGAAAGGGTATAAAGGTGAGTGGCGGAACGATGGCATCATGAACACC |
| | AAGTGCCCGTGTGGGGCCCTGATAGCAGGGCACGTCAAGAACGGATCGATGCGCATCGTGGGCCCCA |
| | AGACCTGCCGAAACACCTGGTGGGGAACCTTCCCTATTAATTCCCATACCACGGGACCAAGTTCTCC |
| | TGTACCCTCCCAYTGTTATCAAAGGGCCTTGTGGAGGGTATCTGCRACGGAGTACGTCGAGATCCTT |
| | CGTCACAATGACCAGCATTAYGTGGTGGGAGTGACGGCGGAGGACCTCAAGTGCCCGTGTCAGGTTC |
| | CTTCCCCCGAATTCTTCAGCTTTGTGGACGGGGTGCGGATACACAGATTCGCCCCTGAACCCAAGCC |
| | CATGATCCGGGAAGAAGCCGCTTTCGTGGTGGGTCTGCACTCATATGTGGTGGGGTCTCAGCTCCCT |
| | TGTGAACCGGAGCCGGACGTCCAAACTGTCTCGCAGCTCCTAACCGACCCCTCACACATCACCGCAG |
| | AAACCGCGGCTAGAAGGCTCAGGAGAGGTTCCCCCCCATCCAACGCCAGTTCTTCTGCTAGTCAACT |
| | CTCAGCTCCATCTCTAAAAGCCACCCACACAACTCTGCCACAACATCCTGACGCAGAACTGATAGAG |
| | GCCAACCTCATGTGGGAACATAAGGTTGGTGCCATCAGAAGGATGGAGACAGACACCAAAGTCATCA |
| | TACTTGACTCCTTTGATTCAGCTTCTTCCGTYGAGGATGACATGGAACCGTCCACCGCCGCGGAGTG |
| | TCTGCGTACGCGTAAGGTCTTCCCACCGGCCATGCCCATATGGGCGAGGCCAGACTACAATCCTCCT |
| | GTTGTGGAGAATTGGAAGGACCCCGAGTACGCACCTCCCCAGGTGTCTGGGTGCGCTCTACCACCTG |
| | CGCAGACCCCTCCTGTTCCACCACCCAGGCGGAAGCGGGCGGTTATCCAACTCACAGAGTCCGCGGT |
| | TTCCACGGCACTGGCGGAACTCGCTGAGAGGTCCTTCCCAAAGGAGGAGGCACCCCCCAGCGACTCC |
| | GCCATTAGTCTGGATTCACCGGCGGCAAATGACCCTCCATCTGATTGTGACCAAGGCAGTGAGATCT |
| | CTTTCTCATCCATGCCACCCCTAGAGGGGGAGCCGGGTGATCCAGACTTGTCTGATGGCTCTTGGTC |
| | AACAGTCAGCACCAGATCTGACGTGATTTGCTGTTCCATGTCCTACTCATGGACGGGAGCCTTAGTG |
| | ACGCCCTCCGGTCCGGAGGAGGAAAGGCTCCCAATAAATGCCCTYAGTAACACCATGCTTCGGCATT |
| | ATAACATGGTTTACAGCACAACATCACGCTCAGCTTCACAAAGAGCAAAAAAAGTGACTTTTGACAG |
| | ATTGCAAGTCCTAGACGACCACTACAAAAGGGCGCTCGCCGACGTGAAAGCGGATGCTTCCACGGTT |
| | AAGGCGCAGTTGCTCTCAGTAGAGGAAGCTGCTGCCCTCACCCCTGCCCACTCAGCCAGATCTAAGT |
| | TTGGGTACGGGGCAAAGGAAGTCAGATCTCTTGCGCCCAAGGCAATGTCTCACATCAAAGAGGTCTG |
| | GAAGGACTTGCTACAGGACATGACCACCCCGATACCGACCACCATAATGGCCAAGAATGAAGTCTTC |
| | TGCGTAAATCCTGCCAAGGGCGGGAAAAAGCCAGCTAGACTGATTGTTTACCCTGACCTAGGTGTGA |
| | GGGTATGCGAGAAGCGGGCTTTGTACGACATAGCTCAAAAGCTTCCGAAGGCCATAATGGGGCAGGC |
| | GTACGGGTTCCAATATTCACCATCGCAGCGGGTCGARTACYTAGTTAAGACGTGGAAGTCCAAACGG |
| | ACTCCCATGGGCTTCTCATATGACACCCGCTGCTTTGATTCCACTGTCACAGAACAAGACATCCGCA |
| | CTGAGAGCGAGATCTATCAGTGCTGCAACCTCGACCCCGAGGCTCGCACCATCATTAACGCCCTTAC |
| | CGAGAGGTTGTACGTGGGGGGACCCATGTTCAACTCTAAAGGTCAGAGGGTCGGTTATCGAAGGTGC |
| | AGAGCCAGCGGAGTTTTCCCCACCAGCATGGGAAACACTATGACGTGCTACATCAAAGCCAAAGCGG |
| | CTGCAGCAGCTGCAGGGCTAGAGAGCACTGATTTCCTGGTCTGCGGCGATGACTTGGTGGTCATTTG |
| | CGAGAGCAAGGGAGTCGAACGGGATAGGGCGGACCTGCAAGCCTTTGCAGCGGCAATGACCAGGTAC |
| | TCCGCTCCACCCGGGGACATGCCCCAGCCCGCTTATGACCTTGAGCACATTGACTCTTGCTCATCCA |
| | ATGTCTCAGTCGCCCGGGACAACTCGGGGAAAAGAGTCTACTACCTCACTAGAGACCCTACCAACCC |
| | ACTATCCAGGGCAGCTTGGGAGACCGCCCGTCACTCACCTGTAAACTCCTGGGTGGGCAACATAATC |
| | ATGTTTGCCCCCACCATATGGGTGAGGATGGTTCTCATGACTCACTTTTTCGCTCTCCTCCTCAATG |
| | AGGAGCGATTGAACGATCCAGTGAGTTTTGAGATGTATGGTGCAACCTACACGGTCTGCCCAACAGA |
| | CTTACCAGACATTATACAAAGACTCCATGGGCTCCGCGCATTTGAACTCCATACTTACTCTCCAGCA |
| | GAACTGACGCGGGTGGCAGCTACCCTCAGGAAGCTTGGGGTGCCACCCCTCAGGACCTGGAGACAAC |
| | GGGCTCGCAAGGTCCGCGCGGGGCTGATAGGCCAGGGGGGCAGGGCTCGCATATGCGGTCTCTACCT |
| | CTTCAACTGGGCTGTCAGGACCAAGATCAAACTCACTCCACTTGCAGGCGCTGGCCGGCTCGATCTT |
| | TCGAGCTGGTTCAGCGTTTGCGCCGGCGAGGCGGACGTGGATCACAGCACGCCCAGAGCCCATCCTC |
| | GCCCATTACTCCTGTGCCTACTCCTACTTGCCGTAGGGGTAGGCATTTTCCTCCTACCCGCTCGGTA |
| | AGCGGGTAACACTCCAGGCTTTTAAGCCATAAATTCTGTTTTTTTTTTTTTTTTTTTTTTTTT |
| 290 | GenBank Accession No. MW735442.1 (B.1.1.7 SARS-CoV-2 variant; Severe |
| | acute respiratory syndrome coronavirus 2 isolate SARS-CoV-2/human/PHL/PH- |
| | PGC-03978/2021) |
| | ACTTTCGATCTCTTGTAGATCTGTTCTCTAAACGAACTTTAAAATCTGTGTGGCTGTCACTCGGCTG |
| | CATGCTTAGTGCACTCACGCAGTATAATTAATAACTAATTACTGTCGTTGACAGGACACGAGTAACT |
| | CGTCTATCTTCTGCAGGCTGCTTACGGTTTCGTCCGTGTTGCAGCCGATCATCAGCACATCTAGGTT |
| | TTGTCCGGGTGTGACCGAAAGGTAAGATGGAGAGCCTTGTCCCTGGTTTCAACGAGAAAACACACGT |
| | CCAACTCAGTTTGCCTGTTTTACAGGTTTGCGACGTGCTCGTACGTGGCTTTGGAGACTCCGTGGAG |
| | GAGGTCTTATCAGAGGCACGTCAACATCTTAAAGATGGCACTTGTGGCTTAGTAGAAGTTGAAAAAG |
| | GCGTTTTGCCTCAACTTGAACAGCCCTATGTGTTCATCAAACGTTCGGATGCTCGAACTGCACCTCA |
| | TGGTCATGTTATGGTTGAGCTGGTAGCAGAACTCGAAGGCATTCAGTACGGTCGTAGTGGTGAGACA |
| | CTTGGTGTCCTTGTCCCTCATGTGGGCGAAATACCAGTGGCTTACCGCAAGGTTCTTCTTCGTAAGA |
| | ACGGTAATAAAGGAGCTGGTGGCCATAGTTACGGCGCCGATCTAAAGTCATTTGACTTAGGCGACGA |
| | GCTTGGCACTGATCCTTATGAAGATTTTCAAGAAAACTGGAACACTAAACATAGCAGTGGTGTTACC |
| | CGTGAACTCATGCGTGAGCTTAACGGAGGGGCATACACTCGCTATGTCGATAACAACTTCTGTGGCC |
| | CTGATGGCTACCCTCTTGAGTGCATTAAAGACCTTCTAGCACGTGCTGGTAAAGCTTCATGCACTTT |
| | GTCTGAACAACTGGACTTTATTGACACTAAGAGGGGTGTATACTGCTGCCGTGAACATGAGCATGAA |
| | ATTGCTTGGTACACGGAACGTTCTGAAAAGAGCTATGAATTGCAGACACCTTTTGAAATTAAATTGG |
| | CAAAGAAATTTGAGACCTTCAATGGGGAATGTCCAAATTTTGTATTTCCCTTAAATTCCATAATCAA |
| | GACTATTCAACCAAGGGTTGAAAAGAAAAAGCTTGATGGCTTTATGGGTAGAATTCGATCTGTCTAT |
| | CCAGTTGCGTCACCAAATGAATGCAACCAAATGTGCCTTTCAACTCTCATGAAGTGTGATCATTGTG |
| | GTGAAACTTCATGGCAGACGGGCGATTTTGTTAAAGCCACTTGCGAATTTTGTGGCACTGAGAATTT |
| | GACTAAAGAAGGTGCCACTACTTGTGGTTACTTACCCCAAAATGCTGTTGTTAAAATTTATTGTCCA |
| | GCATGTCACAATTCAGAAGTAGGACCTGAGCATAGTCTTGCCGAATACCATAATGAATCTGGCTTGA |
| | AAACCATTCTTCGTAAGGGTGGTCGCACTATTGCCTTTGGAGGCTGTGTGTTCTCTTATGTTGGTTG |
| | CCATAACAAGTGTGCCTATTGGGTTCCACGTGCTAGCGCTAACATAGGTTGTAACCATACAGGTGTT |
| | GTTGGAGAAGGTTCCGAAGGTCTTAATGACAACCTTCTTGAAATACTCCAAAAAGAGAAAGTCAACA |
| | TCAATATTGTTGGTGACTTTAAACTTAATGAAGAGATCGCCATTATTTTGGCATCTTTTTCTGCTTC |
| | CACAAGTGCTTTTGTGGAAACTGTGAAAGGTTTGGATTATAAAGCATTCAAACAAATTGTTGAATCC |
| | TGTGGTAATTTTAAAGTTACAAAAGGAAAAGCTAAAAAAGGTGCCTGGAATATTGGTGAACAGAAAT |
| | CAATACTGAGTCCTCTTTATGCATTTGCATCAGAGGCTGCTCGTGTTGTACGATCAATTTTCTCCCG |
| | CACTCTTGAAACTGCTCAAAATTCTGTGCGTGTTTTACAGAAGGCCGCTATAACAATACTAGATGGA |
| | ATTTCACAGTATTCACTGAGACTCATTGATGCTATGATGTTCACATCTGATTTGGCTACTAACAATC |
| | TAGTTGTAATGGCCTACATTACAGGTGGTGTTGTTCAGTTGACTTCGCAGTGGCTAACTAACATCTT |
| | TGGCACTGTTTATGAAAAACTCAAACCCGTCCTTGATTGGCTTGAAGAGAAGTTTAAGGAAGGTGTA |
| | GAGTTTCTTAGAGACGGTTGGGAAATTGTTAAATTTATCTCAACCTGTGCTTGTGAAATTGTCGGTG |
| | GACAAATTGTCACCTGTGCAAAGGAAATTAAGGAGAGTGTTCAGACATTCTTTAAGCTTGTAAATAA |
| | ATTTTTGGCTTTGTGTGCTGACTCTATCATTATTGGTGGAGCTAAACTTAAAGCCTTGAATTTAGGT |
| | GAAACATTTGTCACGCACTCAAAGGGATTGTACAGAAAGTGTGTTAAATCCAGAGAAGAAACTGGCC |
| | TACTCATGCCTCTAAAAGCCCCAAAAGAAATTATCTTCTTAGAGGGAGAAACACTTCCCACAGAAGT |
| | GTTAACAGAGGAAGTTGTCTTGAAAACTGGTGATTTACAACCATTAGAACAACCTACTAGTGAAGCT |
| | GTTGAAGCTCCATTGGTTGGTACACCAGTTTGTATTAACGGGCTTATGTTGCTCGAAATCAAAGACA |
| | CAGAAAAGTACTGTGCCCTTGCACCTAATATGATGGTAACAAACAATACCTTCACACTCAAAGGCGG |
| | TGCACCAACAAAGGTTACTTTTGGTGATGACACTGTGATAGAAGTGCAAGGTTACAAGAGTGTGAAT |
| | ATCACTTTTGAACTTGATGAAAGGATTGATAAAGTACTTAATGAGAAGTGCTCTGCCTATACAGTTG |
| | AACTCGGTACAGAAGTAAATGAGTTCGCCTGTGTTGTGGCAGATGCTGTCATAAAAACTTTGCAACC |
| | AGTATCTGAATTACTTACACCACTGGGCATTGATTTAGATGAGTGGAGTATGGCTACATACTACTTA |
| | TTTGATGAGTCTGGTGAGTTTAAATTGGCTTCACATATGTATTGTTCTTTTTACCCTCCAGATGAGG |
| | ATGAAGAAGAAGGTGATTGTGAAGAAGAAGAGTTTGAGCCATCAACTCAATATGAGTATGGTACTGA |
| | AGATGATTACCAAGGTAAACCTTTGGAATTTGGTGCCACTTCTGCTGCTCTTCAACCTGAAGAAGAG |
| | CAAGAAGAAGATTGGTTAGATGATGATAGTCAACAAACTGTTGGTCAACAAGACGGCAGTGAGGACA |
| | ATCAGACAACTATTATTCAAACAATTGTTGAGGTTCAACCTCAATTAGAGATGGAACTTACACCAGT |
| | TGTTCAGACTATTGAAGTGAATAGTTTTAGTGGTTATTTAAAACTTACTGAGAATGTATACATTAAA |
| | AATGCAGACATTGTGGAAGAAGCTAAAAAGGTAAAACCAACAGTGGTTGTTAATGCAGCCAATGTTT |
| | ACCTTAAACATGGAGGAGGTGTTGCAGGAGCCTTAAATAAGGCTACTAACAATGCCATGCAAGTTGA |
| | ATCTGATGATTACATAGCTACTAATGGACCACTTAAAGTGGGTGGTAGTTGTGTTTTAAGCGGACAC |
| | AATCTTGCTAAACACTGTCTTCATGTTGTCGGCCCAAATGTTAACAAAGGTGAAGACATTCAACTTC |
| | TTAAGAGTGCTTATGAAAATTTTAATCAGCACGAAGTTCTACTTGCACCATTATTATCAGCTGGTAT |
| | TTTTGGTGCTGACCCTATACATTCTTTAAGAGTTTGTGTAGATACTGTTCGCACAAATGTCTACTTA |
| | GCTGTCTTTGATAAAAATCTCTATGACAAACTTGTTTCAAGCTTTTTGGAAATGAAGAGTGAAAAGC |
| | AAGTTGAACAAAAGATCGCTGAGATTCCTAAAGAGGAAGTTAAGCCATTTATAACTGAAAGTAAACC |
| | TTCAGTTGAACAGAGAAAACAAGATGATAAGAAAATCAAAGCTTGTGTTGAAGAAGTTACAACAACT |
| | CTGGAAGAAACTAAGTTCCTCACAGAAAACTTGTTACTTTATATTGACATTAATGGCAATCTTCATC |
| | CAGATTCTGCCACTCTTGTTAGTGACATTGACATCACTTTCTTAAAGAAAGATGCTCCATATATAGT |
| | GGGTGATGTTGTTCAAGAGGGTGTTTTAACTGCTGTGGTTATACCTACTAAAAAGGCTGGTGGCACT |
| | ACTGAAATGCTAGCGAAAGCTTTGAGAAAAGTGCCAACAGACAATTATATAACCACTTACCCGGGTC |
| | AGGGTTTAAATGGTTACACTGTAGAGGAGGCAAAGACAGTGCTTAAAAAGTGTAAAAGTGCCTTTTA |
| | CATTCTACCATCTATTATCTCTAATGAGAAGCAAGAAATTCTTGGAACTGTTTCTTGGAATTTGCGA |
| | GAAATGCTTGCACATGCAGAAGAAACACGCAAATTAATGCCTGTCTGTGTGGAAACTAAAGCCATAG |
| | TTTCAACTATACAGCGTAAATATAAGGGTATTAAAATACAAGAGGGTGTGGTTGATTATGGTGCTAG |
| | ATTTTACTTTTACACCAGTAAAACAACTGTAGCGTCACTTATCAACACACTTAACGATCTAAATGAA |
| | ACTCTTGTTACAATGCCACTTGGCTATGTAACACATGGCTTAAATTTGGAAGAAGCTGCTCGGTATA |
| | TGAGATCTCTCAAAGTGCCAGCTACAGTTTCTGTTTCTTCACCTGATGCTGTTACAGCGTATAATGG |
| | TTATCTTACTTCTTCTTCTAAAACACCTGAAGAACATTTTATTGAAACCATCTCACTTGCTGGTTCC |
| | TATAAAGATTGGTCCTATTCTGGACAATCTACACAACTAGGTATAGAATTTCTTAAGAGAGGTGATA |
| | AAAGTGTATATTACACTAGTAATCCTACCACATTCCACCTAGATGGTGAAGTTATCACCTTTGACAA |
| | TCTTAAGACACTTCTTTCTTTGAGAGAAGTGAGGGCTATTAAGGTGTTTACAACAGTAGACAACATT |
| | AACCTCCACACGCANNNNNNNNNNNNNNNNNNNNNNNNNNNNNNNNNNNNNNNNNNNNNNNNNNNNN |
| | NNNNNNNNNNNNNNNNNNNNNNNNNNNNNNNNNNNNNNNNNNNNNNNNNNNNNNNNNNNNNNNNNNN |
| | NNNNNNNNNNNNNNNNNNNNNNNNNNNNNNNNNNNNNNNNNNNNNNNNNNNNNNNNNNNNNNNNNNN |
| | NNNNNNNNNNNNNNNNNNNNNNNNNNNNNNNNNNNNNNNNNNNNNNNNNNNNNNNNNNNNNNNNNNA |
| | TTAAATGGGCAGATAACAACTGTTATCTTGCCACTGCATTGTTAACACTCCAACAAATAGAGTTGAA |
| | GTTTAATCCACCTGCTCTACAAGATGCTTATTACAGAGCAAGGGCTGGTGAAGCTGATAACTTTTGT |
| | GCACTTATCTTAGCCTACTGTAATAAGACAGTAGGTGAGTTAGGTGATGTTAGAGAAACAATGAGTT |
| | ACTTGTTTCAACATGCCAATTTAGATTCTTGCAAAAGAGTCTTGAACGTGGTGTGTAAAACTTGTGG |
| | ACAACAGCAGACAACCCTTAAGGGTGTAGAAGCTGTTATGTACATGGGCACACTTTCTTATGAACAA |
| | TTTAAGAAAGGTGTTCAGATACCTTGTACGTGTGGTAAACAAGCTACAAAATATCTAGTACAACAGG |
| | AGTCACCTTTTGTTATGATGTCAGCACCACCTGCTCAGTATGAACTTAAGCATGGTACATTTACTTG |
| | TGCTAGTGAGTACACTGGTAATTACCAGTGTGGTCACTATAAACATATAACTTCTAAAGAAACTTTG |
| | TATTGCATAGACGGTGCTTTACTTACAAAGTCCTCAGAATACAAAGGTCCTATTACGGATGTTTTCT |
| | ACAAAGAAAACAGTTACACAACAACCATAAAACCAGTTACTTATAAATTGGATGGTGTTGTTTGTAC |
| | AGAAATTGACCCTAAGTTGGACAATTATTATAAGAAAGACAATTCTTATTTTACAGAGCAACCAATT |
| | GATCTTGTACCAAACCAACCATATCCAAACGCAAGCTTCGATAATTTTAAGTTTGTATGTGATAATA |
| | TCAAATTTGCTGATGATTTAAACCAGTTAACTGGTTATAAGAAACCTGCTTCAAGAGAGCTTAAAGT |
| | TACATTTTTCCCTGACTTAAATGGTGATGTGGTGGCTATTGATTATAAACACTACACACCCTCTTTT |
| | AAGAAAGGAGCTAAATTGTTACATAAACCTATTGTTTGGCATGTTAACAATGCAACTAATAAAGCCA |
| | CGTATAAACCAAATACCTGGTGTATACGTTGTCTTTGGAGCACAAAACCAGTTGAAACATCAAATTC |
| | GTTTGATGTACTGAAGTCAGAGGACGCGCAGGGAATGGATAATCTTGCCTGCGAAGATCTAAAACCA |
| | GTCTCTGAAGAAGTAGTGGAAAATCCTACCATACAGAAAGACGTTCTTGAGTGTAATGTGAAAACTA |
| | CCGAAGTTGTAGGAGACATTATACTTAAACCAGCAAATAATAGTTTAAAAATTACAGAAGAGGTTGG |
| | CCACACAGATCTAATGGCTGCTTATGTAGACAATTCTAGTCTTACTATTAAGAAACCTAATGAATTA |
| | TCTAGAGTATTAGGTTTGAAAACCCTTGCTACTCATGGTTTAGCTGCTGTTAATAGTGTCCCTTGGG |
| | ATACTATAGCTAATTATGCTAAGCCTTTTCTTAACAAAGTTGTTAGTACAACTACTAACATAGTTAC |
| | ACGGTGTTTAAACCGTGTTTGTACTAATTATATGCCTTATTTCTTTACTTTATTGCTACAATTGTGT |
| | ACTTTTACTAGAAGTACAAATTCTAGAATTAAAGCATCTATGCCGACTACTATAGCAAAGAATACTG |
| | TTAAGAGTGTCGGTAAATTTTGTCTAGAGGCTTCATTTAATTATTTGAAGTCACCTAATTTTTCTAA |
| | ACTGATAAATATTACAATTTGGTTTTTACTATTAAGTGTTTGCCTAGGTTCTTTAATCTACTCAACC |
| | GCTGCTTTAGGTGTTTTAATGTCTAATTTAGGCATGCCTTCTTACTGTACTGGTTACAGAGAAGGCT |
| | ATTTGAACTCTACTAATGTCACTATTGCAACCTACTGTACTGGTTCTATACCTTGTAGTGTTTGTCT |
| | TAGTGGTTTAGATTCTTTAGACACCTATCCTTCTTTAGAAACTATACAAATTACCATTTCATCTTTT |
| | AAATGGGATTTAACTGTTTTTGGCTTAGTTGCAGAGTGGTTTTTGGCATATATTCTTTTCACTAGGT |
| | TTTTCTATGTACTTGGATTGGCTGCAATCATGCAATTGTTTTTCAGCTATTTTGCAGTACATTTTAT |
| | TAGTAATTCTTGGCTTATGTGGTTAATAATTAATCTTGTACAAATGGCCCCGATTTCAGCTATGGTT |
| | AGAATGTACATCTTCTTTGCATCATTTTATTATGTATGGAAAAGTTATGTGCATGTTGTAGACGGTT |
| | GTAATTCATCAACTTGTATGATGTGTTACAAACGTAATAGAGCAACAAGAGTCGAATGTACAACTAT |
| | TGTTAATGGTGTTAGAAGGTCCTTTTATGTCTATGCTAATGGAGGTAAAGGCTTTTGCAAACTACAC |
| | AATTGGAATTGTGTTAATTGTGATACATTCTGTGCTGGTAGTACATTTATTAGTGATGAAGTTGCGA |
| | GAGACTTGTCACTACAGTTTAAAAGACCAATAAATCCTACTGACCAGTCTTCTTACATCGTTGATAG |
| | TGTTACAGTGAAGAATGGTTCCATCCATCTTTACTTTGATAAAGCTGGTCAAAAGACTTATGAAAGA |
| | CATTCTCTCTCTCATTTTGTTAACTTAGACAACCTGAGAGCTAATAACACTAAAGGTTCATTGCCTA |
| | TTAATGTTATAGTTTTTGATGGTAAATCAAAATGTGAAGAATCATCTGCAAAATCAGCGTCTGTTTA |
| | CTACAGTCAGCTTATGTGTCAACCTATACTGTTACTAGATCAGGCATTAGTGTCTGATGTTGGTGAT |
| | AGTGCGGAAGTTGCAGTTAAAATGTTTGATGCTTACGTTAATACGTTTTCATCAACTTTTAACGTAC |
| | CAATGGAAAAACTCAAAACACTAGTTGCAACTGCAGAAGCTGAACTTGCAAAGAATGTGTCCTTAGA |
| | CAATGTCTTATCTACTTTTATTTCAGCAGCTCGGCAAGGGTTTGTTGATTCAGATGTAGAAACTAAA |
| | GATGTTGTTGAATGTCTTAAATTGTCACATCAATCTGACATAGAAGTTACTGGCGATAGTTGTAATA |
| | ACTATATGCTCACCTATAACAAAGTTGAAAACATGACACCCCGTGACCTTGGTGCTTGTATTGACTG |
| | TAGTGCGCGTCATATTAATGCGCAGGTAGCAAAAAGTCACAACATTGCTTTGATATGGAACGTTAAA |
| | GATTTCATGTCATTGTCTGAACAACTACGAAAACAAATACGTAGTGCTGCTAAAAAGAATAACTTAC |
| | CTTTTAAGTTGACATGTGCAACTACTAGACAAGTTGTTAATGTTGTAACAACAAAGATAGCACTTAA |
| | GGGTGGTAAAATTGTTAATAATTGGTTGAAGCAGTTAATTAAAGTTACACTTGTGTTCCTTTTTGTT |
| | GCTGCTATTTTCTATTTAATAACACCTGTTCATGTCATGTCTAAACATACTGACTTTTCAAGTGAAA |
| | TCATAGGATACAAGGCTATTGATGGTGGTGTCACTCGTGACATAGCATCTACAGATACTTGTTTTGC |
| | TAACAAACATGCTGATTTTGACACATGGTTTAGCCAGCGTGGTGGTAGTTATACTAATGACAAAGCT |
| | TGCCCATTGATTGCTGCAGTCATAACAAGAGAAGTGGGTTTTGTCGTGCCTGGTTTGCCTGGCACGA |
| | TATTACGCACAACTAATGGTGACTTTTTGCATTTCTTACCTAGAGTTTTTAGTGCAGTTGGTAACAT |
| | CTGTTACACACCATCAAAACTTATAGAGTACACTGACTTTGCAACATCAGCTTGTGTTTTGGCTGCT |
| | GAATGTACAATTTTTAAAGATGCTTCTGGTAAGCCAGTACCATATTGTTATGATACCAATGTACTAG |
| | AAGGTTCTGTTGCTTATGAAAGTTTACGCCCTGACACACGTTATGTGCTCATGGATGGCTCTATTAT |
| | TCAATTTCCTAACACCTACCTTGAAGGTTCTGTTAGAGTGGTAACAACTTTTGATTCTGAGTACTGT |
| | AGGCACGGCACTTGTGAAAGATCAGAAGCTGGTGTTTGTGTATCTACTAGTGGTAGATGGGTACTTA |
| | ACAATGATTATTACAGATCTTTACCAGGAGTTTTCTGTGGTGTAGATGCTGTAAATTTACTTACTAA |
| | TATGTTTACACCACTAATTCAACCTATTGGTGCTTTGGACATATCAGCATCTATAGTAGCTGGTGGT |
| | ATTGTAGCTATCGTAGTAACATGCCTTGCCTACTATTTTATGAGGTTTAGAAGAGCTTTTGGTGAAT |
| | ACAGTCATGTAGTTGCCTTTAATACTTTACTATTCCTTATGTCATTCACTGTACTCTGTTTAACACC |
| | AGTTTACTCATTCTTACCTGGTGTTTATTCTGTTATTTACTTGTACTTGACATTTTATCTTACTAAT |
| | GATGTTTCTTTTTTAGCACATATTCAGTGGATGGTTATGTTCACACCTTTAGTACCTTTCTGGATAA |
| | CAATTGCTTATATCATTTGTATTTCCACAAAGCATTTCTATTGGTTCTTTAGTAATTACCTAAAGAG |
| | ACGTGTAGTCTTTAATGGTGTTTCCTTTAGTACTTTTGAAGAAGCTGCGCTGTGCACCTTTTTGTTA |
| | AATAAAGAAATGTATCTAAAGTTGCGTAGTGATGTGCTATTACCTCTTACGCAATATAATAGATACT |
| | TAGCTCTTTATAATAAGTACAAGTATTTTAGTGGAGCAATGGATACAACTAGCTACAGAGAAGCTGC |
| | TTGTTGTCATCTCGCAAAGGCTCTCAATGACTTCAGTAACTCAGGTTCTGATGTTCTTTACCAACCA |
| | CCACAAACCTCTATCACCTCAGCTGTTTTGCAGAGTGGTTTTAGAAAAATGGCATTCCCATCTGGTA |
| | AAGTTGAGGGTTGTATGGTACAAGTAACTTGTGGTACAACTACACTTAACGGTCTTTGGCTTGATGA |
| | CGTAGTTTACTGTCCAAGACATGTGATCTGCACCTCTGAAGACATGCTTAACCCTAATTATGAAGAT |
| | TTACTCATTCGTAAGTCTAATCATAATTTCTTGGTACAGGCTGGTAATGTTCAACTCAGGGTTATTG |
| | GACATTCTATGCAAAATTGTGTACTTAAGCTTAAGGTTGATACAGCCAATCCTAAGACACCTAAGTA |
| | TAAGTTTGTTCGCATTCAACCAGGACAGACTTTTTCAGTGTTAGCTTGTTACAATGGTTCACCATCT |
| | GGTGTTTACCAATGTGCTATGAGGCCCAATTTCACTATTAAGGGTTCATTCCTTAATGGTTCATGTG |
| | GTAGTGTTGGTTTTAACATAGATTATGACTGTGTCTCTTTTTGTTACATGCACCATATGGAATTACC |
| | AACTGGAGTTCATGCTGGCACAGACTTAGAAGGTAACTTTTATGGACCTTTTGTTGACAGGCAAACA |
| | GCACAAGCAGCTGGTACGGACACAACTATTACAGTTAATGTTTTAGCTTGGTTGTACGCTGCTGTTA |
| | TAAATGGAGACAGGTGGTTTCTCAATCGATTTACCACAACTCTTAATGACTTTAACCTTGTGGCTAT |
| | GAAGTACAATTATGAACCTCTAACACAAGACCATGTTGACATACTAGGACCTCTTTCTGCTCAAACT |
| | GGAATTGCCGTTTTAGATATGTGTGCTTCATTAAAAGAATTACTGCAAAATGGTATGAATGGACGTA |
| | CCATATTGGGTAGTGCTTTATTAGAAGATGAATTTACACCTTTTGATGTTGTTAGACAATGCTCAGG |
| | TGTTACTTTCCAAAGTGCAGTGAAAAGAACAATCAAGGGTACACACCACTGGTTGTTACTCACAATT |
| | TTGACTTCACTTTTAGTTTTAGTCCAGAGTACTCAATGGTCTTTGTTCTTTTTTTTGTATGAAAATG |
| | CCTTTTTACCTTTTGCTATGGGTATTATTGCTATGTCTGCTTTTGCAATGATGTTTGTCAAACATAA |
| | GCATGCATTTCTCTGTTTGTTTTTGTTACCTTCTCTTGCCACTGTAGCTTATTTTAATATGGTCTAT |
| | ATGCCTGCTAGTTGGGTGATGCGTATTATGACATGGTTGGATATGGTTGATACTAGTTTGAAGCTAA |
| | AAGACTGTGTTATGTATGCATCAGCTGTAGTGTTACTAATCCTTATGACAGCAAGAACTGTGTATGA |
| | TGATGGTGCTAGGAGAGTGTGGACACTTATGAATGTCTTGACACTCGTTTATAAAGTTTATTATGGT |
| | AATGCTTTAGATCAAGCCATTTCCATGTGGGCTCTTATAATCTCTGTTACTTCTAACTACTCAGGTG |
| | TAGTTACAACTGTCATGTTTTTGGCCAGAGGTATTGTTTTTATGTGTGTTGAGTATTGCCCTATTTT |
| | CTTCATAACTGGTAATACACTTCAGTGTATAATGCTAGTTTATTGTTTCTTAGGCTATTTTTGTACT |
| | TGTTACTTTGGCCTCTTTTGTTTACTCAACCGCTACTTTAGACTGACTCTTGGTGTTTATGATTACT |
| | TAGTTTCTACACAGGAGTTTAGATATATGAATTCACAGGGACTACTCCCACCCAAGAATAGCATAGA |
| | TGCCTTCAAACTCAACATTAAATTGTTGGGTGTTGGTGGCAAACCTTGTATCAAAGTAGCCACTGTA |
| | CAGTCTAAAATGTCAGATGTAAAGTGCACATCAGTAGTCTTACTCTCAGTTTTGCAACAACTCAGAG |
| | TAGAATCATCATCTAAATTGTGGGCTCAATGTGTCCAGTTACACAATGACATTCTCTTAGCTAAAGA |
| | TACTACTGAAGCCTTTGAAAAAATGGTTTCACTACTTTCTGTTTTGCTTTCCATGCAGGGTGCTGTA |
| | GACATAAACAAGCTTTGTGAAGAAATGCTGGACAACAGGGCAACCTTACAAGCTATAGCCTCAGAGT |
| | TTAGTTCCCTTCCATCATATGCAGCTTTTGCTACTGCTCAAGAAGCTTATGAGCGGGCTGTTGCTAA |
| | TGGTGATTCTGAAGTTGTTCTTAAAAAGTTGAAGAAGTCTTTGAATGTGGCTAAATCTGAATTTGAC |
| | CGTGATGCAGCCATGCAACGTAAGTTGGAAAAGATGGCTGATCAAGCTATGACCCAAATGTATAAAC |
| | AGGCTAGATCTGAGGACAAGAGGGCAAAAGTTACTAGTGCTATGCAGACAATGCTTTTCACTATGCT |
| | TAGAAAGTTGGATAATGATGCACTCAACAACATTATCAACAATGCAAGAGATGGTTGTGTTCCCTTG |
| | AACATAATACCTCTTACAACAGCAGCCAAACTAATGGTTGTCATACCAGACTATAACACATATAAAA |
| | ATACGTGTGATGGTACAACATTTACTTATGCATCAGCATTGTGGGAAATCCAACAGGTTGTAGATGC |
| | AGATAGTAAAATTGTTCAACTTAGTGAAATTAGTATGGACAATTCACCTAATTTAGCATGGCCTCTT |
| | ATTGTAACAGCTTTAAGGGCCAATTCTGCTGTCAAATTACAGAATAATGAGCTTAGTCCTGTTGCAC |
| | TACGACAGATGTCTTGTGCTGCCGGTACTACACAAACTGCTTGCACTGATGACAATGCGTTAGCTTA |
| | CTACAACACAACAAAGGGAGGTAGGTTTGTACTTGCACTGTTATCCGATTTACAGGATTTGAAATGG |
| | GCTAGATTCCCTAAGAGTGATGGAACTGGTACTATCTATACAGAACTGGAACCACCTTGTAGGTTTG |
| | TTACAGACACACCTAAAGGTCCTAAAGTGAAGTATTTATACTTTATTAAAGGATTAAACAACCTAAA |
| | TAGAGGTATGGTACTTGGTAGTTTAGCTGCCACAGTACGTCTACAAGCTGGTAATGCAACAGAAGTG |
| | CCTGCCAATTCAACTGTATTATCTTTCTGTGCTTTTGCTGTAGATGCTGCTAAAGCTTACAAAGATT |
| | ATCTAGCTAGTGGGGGACAACCAATCACTAATTGTGTTAAGATGTTGTGTACACACACTGGTACTGG |
| | TCAGGCAATAACAGTTACACCGGAAGCCAATATGGATCAAGAATCCTTTGGTGGTGCATCGTGTTGT |
| | CTGTACTGCCGTTGCCACATAGATCATCCAAATCCTAAAGGATTTTGTGACTTAAAAGGTAAGTATG |
| | TACAAATACCTACAACTTGTGCTAATGACCCTGTGGGTTTTACACTTAAAAACACAGTCTGTACCGT |
| | CTGCGGTATGTGGAAAGGTTATGGCTGTAGTTGTGATCAANNNNNNNAACCCATGCTTCAGTCAGCT |
| | GATGCACAATCGTTTTTAAACGGGTTTGCGGTGTAAGTGCAGCCCGTCTTACACCGTGCGGCACAGG |
| | CACTAGTACTGATGTCGTATACAGGGCTTTTGACATCTACAATGATAAAGTAGCTGGTTTTGCTAAA |
| | TTCCTAAAANNNNNNTGTNNTCGCTTCCAAGAAAAGGACGAAGATGACAATTTAATTGATTCTTACT |
| | TTGTAGTTAAGAGACACACTTTCTCTAACTACCAACATGAAGAAACAATTTATAATTTACTTAAGGA |
| | TTGTCCAGCTGTTGCTAAACATGACTTCTTTAAGTTTAGAATAGACGGTGACATGGTACCACATATA |
| | TCACGTCAACGTCTTACTAAATACACAATGGCAGACCTCGTCTATGCTTTAAGGCATTTTGATGAAG |
| | GTAATTGTGACACATTAAAAGAAATACTTGTCACATACAATTGTTGTGATGATGATTATTTCAATAA |
| | AAAGGACTGGTATGATTTTGTAGAAAACCCAGATATATTACGCGTATACGCCAACTTAGGTGAACGT |
| | GTACGCCAAGCTTTGTTAAAAACAGTACAATTCTGTGATGCCATGCGAAATGCTGGTATTGTTGGTG |
| | TACTGACATTAGATAATCAAGATCTCAATGGTAACTGGTATGATTTCGGTGATTTCATACAAACCAC |
| | GCCAGGTAGTGGAGTTCCTGTTGTAGATTCTTATTATTCATTGTTAATGCCTATATTAACCTTGACC |
| | AGGGCTTTAACTGCAGAGTCACATGTTGACACTGACTTAACAAAGCCTTACATTAAGTGGGATTTGT |
| | TAAAATATGACTTCACGGAAGAGAGGTTAAAACTCTTTGACCGTTATTTTAAATATTGGGATCAGAC |
| | ATACCACCCAAATTGTGTTAACTGTTTGGATGACAGATGCATTCTGCATTGTGCAAACTTTAATGTT |
| | TTATTCTCTACAGTGTTCCCACTTACAAGTTTTGGACCACTAGTGAGAAAAATATTTGTTGATGGTG |
| | TTCCATTTGTAGTTTCAACTGGATACCACTTCAGAGAGCTAGGTGTTGTACATAATCAGGATGTAAA |
| | CTTACATAGCTCTAGACTTAGTTTTAAGGAATTACTTGTGTATGCTGCTGACCCTGCTATGCACGCT |
| | GCTTCTGGTAATCTATTACTAGATAAACGCACTACGTGCTTTTCAGTAGCTGCACTTACTAACAATG |
| | TTGCTTTTCAAACTGTCAAACCTGGTAATTTTAACAAAGACTTCTATGACTTTGCTGTGTCTAAGGG |
| | TTTCTTTAAGGAAGGAAGTTCTGTTGAATTAAAACACTTCTTCTTTGCTCAGGATGGTAATGCTGCT |
| | ATCAGCGATTATGACTACTATCGTTATAATCTACCAACAATGTGTGATATCAGACAACTACTATTTG |
| | TAGTTGAAGTTGTTGATAAGTACTTTGATTGTTACGATGGTGGCTGTATTAATGCTAACCAAGTCAT |
| | CGTCAACAACCTAGACAAATCAGCTGGTTTTCCATTTAATAAATGGGGTAAGGCTAGACTTTATTAT |
| | GATTCAATGAGTTATGAGGATCAAGATGCACTTTTCGCATATACAAAACGTAATGTCATCCCTACTA |
| | TAACTCAAATGAATCTTAAGTATGCCATTAGTGCAAAGAATAGAGCTCGCACCGTAGCTGGTGTCTC |
| | TATCTGTAGTACTATGACCAATAGACAGTTTCATCAAAAATTATTGAAATCAATAGCCGCCACTAGA |
| | GGAGCTACTGTAGTAATTGGAACAAGCAAATTCTATGGTGGTTGGCACAACATGTTAAAAACTGTTT |
| | ATAGTGATGTAGAAAACCCTCATCTTATGGGTTGGGATTATCCTAAATGTGATAGAGCCATGCCTAA |
| | CATGCTTAGAATTATGGCCTCACTTGTTCTTGCTCGCAAACATACAACGTGTTGTAGCTTGTCACAC |
| | CGTTTCTATAGATTAGCTAATGAGTGTGCTCAAGTATTGAGTGAAATGGTCATGTGTGGCGGTTCAC |
| | TATATGTTAAACCAGGTGGAACCTCATCAGGAGATGCCACAACTGCTTATGCTAATAGTGTTTTTAA |
| | CATTTGTCAAGCTGTCACGGCCAATGTTAATGCACTTTTATCTACTGATGGTAACAAAATTGCCGAT |
| | AAGTATGTCCGCAATTTACAACACAGACTTTATGAGTGTCTCTATAGAAATAGAGATGTTGACACAG |
| | ACTTTGTGAATGAGTTTTACGCATATTTGCGTAAACATTTCTCAATGATGATACTCTCTGACGATGC |
| | TGTTGTGTGTTTCAATAGCACTTATGCATCTCAAGGTCTAGTGGCTAGCATAAAGAACTTTAAGTCA |
| | GTTCTTTATTATCAAAACAATGTTTTTATGTCTGAAGCAAAATGTTGGACTGAGACTGACCTTACTA |
| | AAGGACCTCATGAATTTTGCTCTCAACATACAATGCTAGTTAAACAGGGTGATGATTATGTGTACCT |
| | TCCTTACCCAGATCCATCAAGAATCCTAGGGGCCGGCTGTTTTGTAGATGATATCGTAAAAACAGAT |
| | GGTACACTTATGATTGAACGGTTCGTGTCTTTAGCTATAGATGCTTACCCACTTACTAAACATCCTA |
| | ATCAGGAGTATGCTGATGTCTTTCATTTGTACTTACAATACATAAGAAAGCTACATGATGAGTTAAC |
| | AGGACACATGTTAGACATGTATTCTGTTATGCTTACTAATGATAACACCTCAAGGTATTGGGAACCT |
| | GAGTTTTATGAGGCTATGTACACACCGCATACAGTCTTACAGGCTGTTGGGGCTTGTGTTCTTTGCA |
| | ATTCACAGACTTCATTAAGATGTGGTGCTTGCATACGTAGACCATTCTTATGTTGTAAATGCTGTTA |
| | CGACCATGTCATATCAACATCACATAAATTAGTCTTGTCTGTTAATCCGTATGTTTGCAATGCTCCA |
| | GGTTGTGATGTCACAGATGTGACTCAACTTTACTTAGGAGGTATGAGCTATTATTGTAAATCACATA |
| | AACCACCCATTAGTTTTCCATTGTGTGCTAATGGACAAGTTTTTGGTTTATATAAAAATACATGTGT |
| | TGGTAGCGATAATGTTACTGACTTTAATGCAATTGCAACATGTGACTGGACAAATGCTGGTGATTAC |
| | ATTTTAGCTAACACCTGTACTGAAAGACTCAAGCTTTTTGCAGCAGAAACGCTCAAAGCTACTGAGG |
| | AGACATTTAAACTGTCTTATGGTATTGCTACTGTACGTGAAGTGCTGTCTGACAGAGAATTACATCT |
| | TTCATGGGAAGTTGGTAAACCTAGACCACCACTTAACCGAAATTATGTCTTTACTGGTTATCGTGTA |
| | ACTAAAAACAGTAAAGTACAAATAGGAGAGTACACCTTTGAAAAAGGTGACTATGGTGATGCTGTTG |
| | TTTACCGAGGTACAACAACTTACAAATTAAATGTTGGTGATTATTTTGTGCTGACATCACATACAGT |
| | AATGCCATTAAGTGCACCTACACTAGTGCCACAAGAGCACTATGTTAGAATTACTGGCTTATACCCA |
| | ACACTCAATATCTCAGATGAGTTTTCTAGCAATGTTGCAAATTATCAAAAGGTTGGTATGCAAAAGT |
| | ATTCTACACTCCAGGGACCACCTGGTACTGGTAAGAGTCATTTTGCTATTGGCCTAGCTCTCTACTA |
| | CCCTTCTGCTCGCATAGTGTATACAGCTTGCTCTCATGCCGCTGTTGATGCACTATGTGAGAAGGCA |
| | TTAAAATATTTGCCTATAGATAAATGTAGTAGAATTATACCTGCACGTGCTCGTGTAGAGTGTTTTG |
| | ATAAATTCAAAGTGAATTCAACATTAGAACAGTATGTCTTTTGTACTGTAAATGCATTGCCTGAGAC |
| | GACAGCAGATATAGTTGTCTTTGATGAAATTTCAATGGCCACAAATTATGATTTGAGTGTTGTCAAT |
| | GCCAGATTACGTGCTAAGCACTATGTGTACATTGGCGACCCTGCTCAATTACCTGCACCACGCACAT |
| | TGCTAACTAAGGGCACACTAGAACCAGAATATTTCAATTCAGTGTGTAGACTTATGAAAACTATAGG |
| | TCCAGACATGTTCCTCGGAACTTGTCGGCGTTGTCCTGCTGAAATTGTTGACACTGTGAGTGCTTTG |
| | GTTTATGATAATAGGCTTAAAGCACATAAAGACAAATCAGCTCAATGCTTTAAAATGTTTTATAAGG |
| | GTGTTATCACGCATGATGTTTCATCTGCAATTAACAGGCCACAAATAGGCGTGGTAAGAGAATTCCT |
| | TACACGTAACCCTGCTTGGAGAAAAGCTGTCTTTATTTCACCTTATAATTCACAGAATGCTGTAGCC |
| | TCAAAGATTTTGGGACTACCAACTCAAACTGTTGATTCATCACAGGGCTCAGAATATGACTATGTCA |
| | TATTCACTCAAACCACTGAAACAGCTCACTCTTGTAATGTAAACAGATTTAATGTTGCTATTACCAG |
| | AGCAAAAGTAGGCATACTTTGCATAATGTCTGATAGAGACCTTTATGACAAGTTGCAATTTACAAGT |
| | CTTGAAATTCCACGTAGGAATGTGGCAACTTTACAAGCTGAAAATGTAACAGGACTCTTTAAAGATT |
| | GTAGTAAGGTAATCACTGGGTTACATCCTACACAGGCACCTACACACCTCAGTGTTGACACTAAATT |
| | CAAAACTGAAGGTTTATGTGTTGACATACCTGGCATACCTAAGGACATGACCTATAGAAGACTCATC |
| | TCTATGATGGGTTTTAAAATGAATTATCAAGTTAATGGTTACCCTAACATGTTTATCACCCGCGAAG |
| | AAGCTATAAGACATGTACGTGCATGGATTGGCTTCGATGTCGAGGGGTGTCATGCTACTAGAGAAGC |
| | TGTTGGTACCAATTTACCTTTACAGCTAGGTTTTTCTACAGGTGTTAACCTAGTTGCTGTACCTACA |
| | GGTTATGTTGATACACCTAATAATACAGATTTTTCCAGAGTTAGTGCTAAACCACCGCCTGGAGATC |
| | AATTTAAACACCTCATACCACTTATCTACAAACCACTTCCTTCCAATCTACTCCCTATAAACATTCT |
| | ACAAATGTTAAGTGACACACTTAAAAATCTCTCTGACAGAGTCGTATTTGTCTTATGGGCACATGGC |
| | TTTGAGTTGACATCTATGAAGTATTTTGTGAAAATAGGACCTGAGCGCACCTGTTGTCTATGTGATA |
| | GACGTGCCACATGCTTTTCCACTGCTTCAGACACTTATGCCTGTTGGCATCATTCTATTGGATTTGA |
| | TTACGTCTATAATCCGTTTATGATTGATGTTCAACAATGGGGTTTTACAGGTAACCTACAAAGCAAC |
| | CATGATCTGTATTGTCAAGTCCATGGTAATGCACATGTAGCTAGTTGTGATGCAATCATGACTAGGT |
| | GTCTAGCTGTCCACGAGTGCTTTGTTAAGCGTGTTGACTGGACTATTGAATATCCTATAATTGGTGA |
| | TGAACTGAAGATTAATGCGGTTTGTAGAAAGGTTCAACACATGGTTGTTAAAGCTGCATTATTAGCA |
| | GACAAATTCCCAGTTCTTCACGACATTGGTAACCCTAAAGCTATTAAGTGTGTACCTCAAGCTGATG |
| | TAGAATGGAAGTTCTATGATGCACAGCCTTGTAGTGACAAAGCTTATAAAATAGAAGAATTATTCTA |
| | TTCTTATGCCACACATTCTGACAAATTCACAGATGGTGTATGCCTATTTTGGAATTGCAATGTCGAT |
| | AGATATCCTGCTAATTCCATTGTTTGTAGATTTGACACTAGAGTGCTATCTAACCTTAACTTGCCTG |
| | GTTGTGATGGTGGCAGTTTGTATGTAAATAAACATGCATTCCACACACCAGCTTTTGATAAAAGTGC |
| | TTTTGTTAATTTAAAACAATTACCATTTTTCTATTACTCTGACAGTCCATGTGAGTCTCATGGAAAA |
| | CAAGTAGTGTCAGATATAGATTATGTACCACTAAAGTCTGCTACGTGTATAACACGTTGCAATTTAG |
| | GTGGTGCTGTCTGTAGACATCATGCTAATGAGTACAGATTGTATCTCGATGCTTATAACATGATGAT |
| | CTCAGCTGGCTTTAGCTTGTGGGTTTACAAACAATTTGATACTTATAACCTCTGGAACACTTTTACA |
| | AGACTTCAGAGTTTAGAAAATGTGGCTTTTAATGTTGTAAATAAGGGACACTTTGATGGACAACAGG |
| | GTGAAGTACCAGTTTCTATCATTAATAACACTGTTTACACAAAAGTTGATGGTGTTGATGTAGAATT |
| | GTTTGAAAATAAAACAACATTACCTGTTAATGTAGCATTTGAGCTTTGGGCTAAGCGCAACATTAAA |
| | CCAGTACCAGAGGTGAAAATACTCAATAATTTGGGTGTGGACATTGCTGCTAATACTGTGATCTGGG |
| | ACTACAAAAGAGATGCTCCAGCACATATATCTACTATTGGTGTTTGTTCTATGACTGACATAGCCAA |
| | GAAACCAACTGAAACGATTTGTGCACCACTCACTGTCTTTTTTGATGGTAGAGTTGATGGTCAAGTA |
| | GACTTATTTAGAAATGCCCGTAATGGTGTTCTTATTACAGAAGGTAGTGTTAAAGGTTTACAACCAT |
| | CTGTAGGTCCCAAACAAGCTAGTCTTAATGGAGTCACATTAATTGGAGAAGCCGTAAAAACACAGTT |
| | CAATTATTATAAGAAAGTTGATGGTGTTGTCCAACAATTACCTGAAACTTACTTTACTCAGAGTAGA |
| | AATTTACAAGAATTTAAACCCAGGAGTCAAATGGAAATTGATTTCTTAGAATTAGCTATGGATGAAT |
| | TCATTGAACGGTATAAATTAGAAGGCTATGCCTTCGAACATATCGTTTATGGAGATTTTAGTCATAG |
| | TCAGTTAGGTGGTTTACATCTACTGATTGGACTAGCTAAACGTTTTAAGGAATCACCTTTTGAATTA |
| | GAAGATTTTATTCCTATGGACAGTACAGTTAAAAACTATTTCATAACAGATGCGCAAACAGGTTCAT |
| | CTAAGTGTGTGTGTTCTGTTATTGATTTATTACTTGATGATTTTGTTGAAATAATAAAATCCCAAGA |
| | TTTATCTGTAGTTTCTAAGGTTGTCAAAGTGACTATTGACTATACAGAAATTTCATTTATGCTTTGG |
| | TGTAAAGATGGCCATGTAGAAACATTTTACCCAAAATTACAATCTAGTCAAGCGTGGCAACCGGGTG |
| | TTGCTATGCCTAATCTTTACAAAATGCAAAGAATGCTATTAGAAAAGTGTGACCTTCAAAATTATGG |
| | TGATAGTGCAACATTACCTAAAGGCATAATGATGAATGTCGCAAAATATACTCAACTGTGTCAATAT |
| | TTAAACACATTAACATTAGCTGTACCCTATAATATGAGAGTTATACATTTTGGTGCTGGTTCTGATA |
| | AAGGAGTTGCACCAGGTACAGCTGTTTTAAGACAGTGGTTGCCTACGGGTACGCTGCTTGTCGATTC |
| | AGATCTTAATGACTTTGTCTCTGATGCAGATTCAACTTTGATTGGTGATTGTGCAACTGTACATACA |
| | GCTAATAAATGGGATCTCATTATTAGTGATATGTACGACCCTAAGACTAAAAATGTTACAAAAGAAA |
| | ATGACTCTAAAGAGGGTTTTTTCACTTACATTTGTGGGTTTATACAACAAAAGCTAGCTCTTGGAGG |
| | TTCCGTGGCTATAAAGATAACAGAACATTCTTGGAATGCTGATCTTTATAAGCTCATGGGACACTTC |
| | GCATGGTGGACAGCCTTTGTTACTAATGTGAATGCGTCATCATCTGAAGCATTTTTAATTGGATGTA |
| | ATTATCTTGGCAAACCACGCGAACAAATAGATGGTTATGTCATGCATGCAAATTACATATTTTGGAG |
| | GAATACAAATCCAATTCAGTTGTCTTCCTATTCTTTATTTGACATGAGTAAATTTCCCCTTAAATTA |
| | AGGGGTACTGCTGTTATGTCTTTAAAAGAAGGTCAAATCAATGATATGATTTTATCTCTTCTTAGTA |
| | AAGGTAGACTTATAATTAGAGAAAACAACAGAGTTGTTATTTCTAGTGATGTTCTTGTTAACAACTA |
| | AACGAACAATGTTTGTTTTTCTTGTTTTATTGCCACTAGTCTCTAGTCAGTGTGTTAATCTTACAAC |
| | CAGAACTCAATTACCCCCTGCATACACTAATTCTTTCACACGTGGTGTTTATTACCCTGACAAAGTT |
| | TTCAGATCCTCAGTTTTACATTCAACTCAGGACTTGTTCTTACCTTTCTTTTCCAATGTTACTTGGT |
| | TCCATGCTATCTCTGGGACCAATGGTACTAAGAGGTTTGATAACCCTGTCCTACCATTTAATGATGG |
| | TGTTTATTTTGCTTCCACTGAGAAGTCTAACATAATAAGAGGCTGGATTTTTGGTACTACTTTAGAT |
| | TCGAAGACCCAGTCCCTACTTATTGTTAATAACGCTACTAATGTTGTTATTAAAGTCTGTGAATTTC |
| | AATTTTGTAATGATCCATTTTTGGGTGTTTACCACAAAAACAACAAAAGTTGGATGGAAAGTGAGTT |
| | CAGAGTTTATTCTAGTGCGAATAATTGCACTTTTGAATATGTCTCTCAGCCTTTTCTTATGGACCTT |
| | GAAGGAAAACAGGGTAATTTCAAAAATCTTAGGGAATTTGTGTTTAAGAATATTGATGGTTATTTTA |
| | AAATATATTCTAAGCACACGCCTATTAATTTAGTGCGTGATCTCCCTCAGGGTTTTTCGGCTTTAGA |
| | ACCATTGGTAGATTTGCCAATAGGTATTAACATCACTAGGTTTCAAACTTTACTTGCTTTACATAGA |
| | AGTTATTTGACTCCTGGTGATTCTTCTTCAGGTTGGACAGCTGGTGCTGCAGCTTATTATGTGGGTT |
| | ATCTTCAACCTAGGACTTTTCTATTAAAATATAATGAAAATGGAACCATTACAGATGCTGTAGACTG |
| | TGCACTTGACCCTCTCTCAGAAACAAAGTGTACGTTGAAATCCTTCACTGTAGAAAAAGGAATCTAT |
| | CAAACTTCTAACTTTAGAGTCCAACCAACAGAATCTATTGTTAGATTTCCTAATATTACAAACTTGT |
| | GCCCTTTTGGTGAAGTTTTTAACGCCACCAGATTTGCATCTGTTTATGCTTGGAACAGGAAGAGAAT |
| | CAGCAACTGTGTTGCTGATTATTCTGTCCTATATAATTCCGCATCATTTTCCACTTTTAAGTGTTAT |
| | GGAGTGTCTCCTACTAAATTAAATGATCTCTGCTTTACTAATGTCTATGCAGATTCATTTGTAATTA |
| | GAGGTGATGAAGTCAGACAAATCGCTCCAGGGCAAACTGGAAAGATTGCTGATTATAATTATAAATT |
| | ACCAGATGATTTTACAGGCTGCGTTATAGCTTGGAATTCTAACAATCTTGATTCTAAGGTTGGTGGT |
| | AATTATAATTACCTGTATAGATTGTTTAGGAAGTCTAATCTCAAACCTTTTGAGAGAGATATTTCAA |
| | CTGAAATCTATCAGGCCGGTAGCACACCTTGTAATGGTGTTGAAGGTTTTAATTGTTACTTTCCTTT |
| | ACAATCATATGGTTTCCAACCCACTTATGGTGTTGGTTACCAACCATACAGAGTAGTAGTACTTTCT |
| | TTTGAACTTCTACATGCACCAGCAACTGTTTGTGGACCTAAAAAGTCTACTAATTTGGTTAAAAACA |
| | AATGTGTCAATTTCAACTTCAATGGTTTAACAGGCACAGGTGTTCTTACTGAGTCTAACAAAAAGTT |
| | TCTGCCTTTCCAACAATTTGGCAGAGACATTGATGACACTACTGATGCTGTCCGTGATCCACAGACA |
| | CTTGAGATTCTTGACATTACACCATGTTCTTTTGGTGGTGTCAGTGTTATAACACCAGGAACAAATA |
| | CTTCTAACCAGGTTGCTGTTCTTTATCAGGGTGTTAACTGCACAGAAGTCCCTGTTGCTATTCATGC |
| | AGATCAACTTACTCCTACTTGGCGTGTTTATTCTACAGGTTCTAATGTTTTTCAAACACGTGCAGGC |
| | TGTTTAATAGGGGCTGAACATGTCAACAACTCATATGAGTGTGACATACCCATTGGTGCAGGTATAT |
| | GCGCTAGTTATCAGACTCAGACTAATTCTCGTCGGCGGGCACGTAGTGTAGCTAGTCAATCCATCAT |
| | TGCCTACACTATGTCACTTGGTGCAGAAAATTCAGTTGCTTACTCTAATAACTCTATTGCCATACCC |
| | ATAAATTTTACTATTAGTGTTACCACAGAAATTCTACCAGTGTCTATGACCAAGACATCAGTAGATT |
| | GTACAATGTACATTTGTGGTGATTCAACTGAATGCAGCAATCTTTTGTTGCAATATGGCAGTTTTTG |
| | TACACAATTAAACCGTGCTTTAACTGGAATAGCTGTTGAACAAGACAAAAACACCCAAGAAGTTTTT |
| | GCACAAGTCAAACAAATTTACAAAACACCACCAATTAAAGATTTTGGTGGTTTTAATTTTTCACAAA |
| | TATTACCAGATCCATCAAAACCAAGCAAGAGGTCATTTATTGAAGATCTACTTTTCAACAAAGTGAC |
| | ACTTGCAGATGCTGGCTTCATCAAACAATATGGTGATTGCCTTGGTGATATTGCTGCTAGAGACCTC |
| | ATTTGTGCACAAAAGTTTAACGGCCTTACTGTTTTGCCACCTTTGCTCACAGATGAAATGATTGCTC |
| | AATACACTTCTGCACTGTTAGCGGGTACAATCACTTCTGGTTGGACCTTTGGTGCAGGTGCTGCATT |
| | ACAAATACCATTTGCTATGCAAATGGCTTATAGGTTTAATGGTATTGGAGTTACACAGAATGTTCTC |
| | TATGAGAACCAAAAATTGATTGCCAACCAATTTAATAGTGCTATTGGCAAAATTCAAGACTCACTTT |
| | CTTCCACAGCAAGTGCACTTGGAAAACTTCAAGATGTGGTCAACCAAAATGCACAAGCTTTAAACAC |
| | GCTTGTTAAACAACTTAGCTCCAATTTTGGTGCAATTTCAAGTGTTTTAAATGATATCCTTGCACGT |
| | CTTGACAAAGTTGAGGCTGAAGTGCAAATTGATAGGTTGATCACAGGCAGACTTCAAAGTTTGCAGA |
| | CATATGTGACTCAACAATTAATTAGAGCTGCAGAAATCAGAGCTTCTGCTAATCTTGCTGCTACTAA |
| | AATGTCAGAGTGTGTACTTGGACAATCAAAAAGAGTTGATTTTTGTGGAAAGGGCTATCATCTTATG |
| | TCCTTCCCTCAGTCAGCACCTCATGGTGTAGTCTTCTTGCATGTGACTTATGTCCCTGCACAAGAAA |
| | AGAACTTCACAACTGCTCCTGCCATTTGTCATGATGGAAAAGCACACTTTCCTCGTGAAGGTGTCTT |
| | TGTTTCAAATGGCACACACTGGTTTGTAACACAAAGGAATTTTTATGAACCACAAATCATTACTACA |
| | CACAACACATTTGTGTCTGGTAACTGTGATGTTGTAATAGGAATTGTCAACAACACAGTTTATGATC |
| | CTTTGCAACCTGAATTAGACTCATTCAAGGAGGAGTTAGATAAATATTTTAAGAATCATACATCACC |
| | AGATGTTGATTTAGGTGACATCTCTGGCATTAATGCTTCAGTTGTAAACATTCAAAAAGAAATTGAC |
| | CGCCTCAATGAGGTTGCCAAGAATTTAAATGAATCTCTCATCGATCTCCAAGAACTTGGAAAGTATG |
| | AGCAGTATATAAAATGGCCATGGTACATTTGGCTAGGTTTTATAGCTGGCTTGATTGCCATAGTAAT |
| | GGTGACAATTATGCTTTGCTGTATGACCAGTTGCTGTAGTTGTCTCAAGGGCTGTTGTTCTTGTGGA |
| | TCCTGCTGCAAATTTGATGAAGACGACTCTGAGCCAGTGCTCAAAGGAGTCAAATTACATTACACAT |
| | AAACGAACTTATGGATTTGTTTATGAGAATCTTCACAATTGGAACTGTAACTTTGAAGCAAGGTGAA |
| | ATCAAGGATGCTACTCCTTCAGATTTTGTTCGCGCTACTGCAACGATACCGATACAAGCCTCACTCC |
| | CTTTCGGATGGCTTATTGTTGGCGTTGCACTTCTTGCTGTTTTTCAGAGCGCTTCCAAAATCATAAC |
| | CCTCAAAAAGAGATGGCAACTAGCACTCTCCAAGGGTGTTCACTTTGTTTGCAACTTGCTGTTGTTG |
| | TTTGTAACAGTTTACTCACACCTTTTGCTCGTTGCTGCTGGCCTTGAAGCCCCTTTTCTCTATCTTT |
| | ATGCTTTAGTCTACTTCTTGCAGAGTATAAACTTTGTAAGAATAATAATGAGGCTTTGGCTTTGCTG |
| | GAAATGCCGTTCCAAAAACCCATTACTTTATGATGCCAACTATTTTCTTTGCTGGCATACTAATTGT |
| | TACGACTATTGTATACCTTACAATAGTGTAACTTCTTCAATTGTCATTACTTCAGGTGATGGCACAA |
| | CAAGTCCTATTTCTGAACATGACTACCAGATTGGTGGTTATACTGAAAAATGGGAATCTGGAGTAAA |
| | AGACTGTGTTGTATTACACAGTTACTTCACTTCAGACTATTACCAGCTGTACTCAACTCAATTGAGT |
| | ACAGACACTGGTGTTGAACATGTTACCTTCTTCATCTACAATAAAATTGTTGATGAGCCTGAAGAAC |
| | ATGTCCAAATTCACACAATCGACGGTTCATCCGGAGTTGTTAATCCAGTAATGGAACCAATTTATGA |
| | TGAACCGACGACGACTACTAGCGTGCCTTTGTAAGCACAAGCTGATGAGTACGAACTTATGTACTCA |
| | TTCGTTTCGGAAGAGACAGGTACGTTAATAGTTAATAGCGTACTTCTTTTTCTTGCTTTCGTGGTAT |
| | TCTTGCTAGTTACACTAGCCATCCTTACTGCGCTTCGATTGTGTGCGTACTGCTGCAATATTGTTAA |
| | CGTGAGTCTTGTAAAACCTTCTTTTTACGTTTACTCTCGTGTTAAAAATCTGAATTCTTCTAGAGTT |
| | CCTGATCTTCTGGTCTAAACGAACTAAATATTATATTAGTTTTTCTGTTTGGAACTTTAATTTTAGC |
| | CATGGCAGATTCCAACGGTACTATTACCGTTGAAGAGCTTAAAAAGCTCCTTGAACAATGGAACCTA |
| | GTAATAGGTTTCCTATTCCTTACATGGATTTGTCTTCTACAATTTGCCTATGCCAACAGGAATAGGT |
| | TTTTGTATATAATTAAGTTAATTTTCCTCTGGCTGTTATGGCCAGTAACTTTAGCTTGTTTTGTGCT |
| | TGCTGCTGTTTACAGAATAAATTGGATCACCGGTGGAATTGCTATCGCAATGGCTTGTCTTGTAGGC |
| | TTGATGTGGCTCAGCTACTTCATTGCTTCTTTCAGACTGTTTGCGCGTACGCGTTCCATGTGGTCAT |
| | TCAATCCAGAAACTAACATTCTTCTCAACGTGCCACTCCATGGCACTATTCTGACCAGACCGCTTCT |
| | AGAAAGTGAACTCGTAATCGGAGCTGTGATCCTTCGTGGACATCTTCGTATTGCTGGACACCATCTA |
| | GGACGCTGTGACATCAAGGACCTGCCTAAAGAAATCACTGTTGCTACATCACGAACGCTTTCTTATT |
| | ACAAATTGGGAGCTTCGCAGCGTGTAGCAGGTGACTCAGGTTTTGCTGCATACAGTCGCTACAGGAT |
| | TGGCAACTATAAATTAAACACAGACCATTCCAGTAGCAGTGACAATATTGCTTTGCTTGTACAGTAA |
| | GTGACAACAGATGTTTCATCTCGTTGACTTTCAGGTTACTATAGCAGAGATATTACTAATTATTATG |
| | AGGACTTTTAAAGTTTCCATTTGGAATCTTGATTACATCATAAACCTCATAATTAAAAATTTATCTA |
| | AGTCACTAACTGAGAATAAATATTCTCAATTAGATGAAGAGCAACCAATGGAGATTGATTAAACGAA |
| | CATGAAAATTATTCTTTTCTTGGCACTGATAACACTCGCTACTTGTGAGCTTTATCACTACCAAGAG |
| | TGTGTTAGAGGTACAACAGTACTTTTAAAAGAACCTTGCTCTTCTGGAACATACGAGGGCAATTCAC |
| | CATNNNNNNNNNNNNNNNNNNNNNNNNNNNNNNNNNNNNNNNNNNNNNNNNNNNNNNNNNNNNNNNN |
| | NNNNNNNNGCGTAAAACACGTNNNNNNNNNNNNNNNNNNNNNNNNNNNNNNNNNNNNNNNNNNNNNN |
| | NNNNNNNNNNNNNNNNNNNNNNNNNNNNNNNNNNNNNNNNNNNNNNNNNNNNNNNNNNNNNNNNNNN |
| | NNNNNNNNNNNNNNNNNNNNNNNNNNNNNNNNNNNNNNNNNNNNNNNNNNNNNNNNNNNNGTGCTTT |
| | TTAGCCTTTCTGCTATTCCTTGTTTTAATTATGCTTATTATCTTTTGGTTCTCACTTGAACTGCAAG |
| | ATCATAATGAAACTTGTCACGCCTAAACGAACATGAAATTTCTTGTTTTCTTAGGAATCATCACAAC |
| | TGTAGCTGCATTTCACCAAGAATGTAGTTTACAGTCATGTACTTAACATCAACCATATGTAGTTGAT |
| | GACCCGTGTCCTATTCACTTCTATTCTAAATGGTATATTAGAGTAGGAGCTATAAAATCAGCACCTT |
| | TAATTGAATTGTGCGTGGATGAGGCTGGTTCTAAATCACCCATTCAGTGCATCGATATCGGTAATTA |
| | TACAGTTTCCTGTTTACCTTTTACAATTAATTGCCAGGAACCTAAATTGGGTAGTCTTGTAGTGCGT |
| | TGTTCGTTCTATGAAGACTTTTTAGAGTATCATGACGTTCGTGTTGTTTTAGATTTCATCTAAACGA |
| | ACAAACTAAATGTCTCTAAATGGACCCCAAAATCAGCGAAATGCACCCCGCATTACGTTTGGTGGAC |
| | CCTCAGATTCAACTGGCAGTAACCAGAATGGAGAACGCAGTGGGGCGCGATCAAAACAACGTCGGCC |
| | CCAAGGTTTACCCAATAATACTGCGTCTTGGTTCACCGCTCTCACTCAACATGGCAAGGAAGACCTT |
| | AAATTCCCTCGAGGACAAGGCGTTCCAATTAACACCAATAGCAGTCCAGATGACCAAATTGGCTACT |
| | ACCGAAGAGCTACCAGACGAATTCGTGGTGGTGACGGTAAAATGAAAGATCTCAGTCCAAGATGGTA |
| | TTTCTACTACCTAGGAACTGGGCCAGAAGCTGGACTTCCCTATGGTGCTAACAAAGACGGCATCATA |
| | TGGGTTGCAACTGAGGGAGCCTTGAATACACCAAAAGATCACATTGGCACCCGCAATCCTGCTAACA |
| | ATGCTGCAATCGTGCTACAACTTCCTCAAGGAACAACATTGCCAAAAGGCTTCTACGCAGAAGGGAG |
| | CAGAGGCGGCAGTCAAGCCTCTTCTCGTTCCTCATCACGTAGTCGCAACAGTTCAAGAAATTCAACT |
| | CCAGGCAGCAGTAAACGAACTTCTCCTGCTAGAATGGCTGGCAATGGCGGTGATGCTGCTCTTGCTT |
| | TGCTGCTGCTTGACAGATTGAACCAGCTTGAGAGCAAAATGTTTGGTAAAGGCCAACAACAACAAGG |
| | CCAAACTGTCACTAAGAAATCTGCTGCTGAGGCTTCTAAGAAGCCTCGGCAAAAACGTACTGCCACT |
| | AAAGCATACAATGTAACACAAGCTTTCGGCAGACGTGGTCCAGAACAAACCCAAGGAAATTTTGGGG |
| | ACCAGGAACTAATCAGACAAGGAACTGATTACAAACATTGGCCGCAAATTGCACAATTTGCCCCCAG |
| | CGCTTCAGCGTTCTTCGGAATGTCGCGCATTGGCATGGAAGTCACACCTTCGGGAACGTGGTTGACC |
| | TACACAGGTGCCATCAAATTGGATGACAAAGATCCAAATTTCAAAGATCAAGTCATTTTGCTGAATA |
| | AGCATATTGACGCATACAAAACATTCCCACCAACAGAGCCTAAAAAGGACAAAAAGAAGAAGGCTGA |
| | TGAAACTCAAGCCTTACCGCAGAGACAGAAGAAACAGCAAACTGTGACTCTTCTTCCTGCTGCAGAT |
| | TTGGATGATTTCTCCAAACAATTGCAACAATCCATGAGCAGTGCTGACTCAACTCAGGCCTAAACTC |
| | ATGCAGACCACACAAGGCAGATGGGCTATATAAACGTTTTCGCTTTTCCGTTTACGATATATAGTCT |
| | ACTCTTGTGCAGAATGAATTCTCGTAACTACATAGCACAAGTAGATGTAGTTAACTTTAATCTCACA |
| | TAGCAATCTTTAATCAGTGTGTAACATTAGGGAGGACTTGAAAGAGCCACCACATTTTCACCGAGGC |
| | CACGCGGAGTACGATCGAGTGTACAGTGAACAATGCTAGGGAGAGCTGCCTATATGGAAGAGCCCTA |
| | ATGTGTAAAATTAATTTTAGTAGTGCTATCCCCATGTGATTTTAATAGC |
| 291 | GenBank Accession No. MW692118.1(B.1.1.7 SARS-CoV-2 variant; Severe acute |
| | respiratory syndrome coronavirus 2 isolate SARS-CoV-2/human/LBN/Lebanon 7- |
| | B.1.1.7/2020) |
| | AGATCTGTTCTCTAAACGAACTTTAAAATCTGTGTGGCTGTCACTCGGCTGCATGCTTAGTGCACTC |
| | ACGCAGTATAATTAATAACTAATTACTGTCGTTGACAGGACACGAGTAACTCGTCTATCTTCTGCAG |
| | GCTGCTTACGGTTTCGTCCGTGTTGCAGCCGATCATCAGCACATCTAGGTTTTGTCCGGGTGTGACC |
| | GAAAGGTAAGATGGAGAGCCTTGTCCCTGGTTTCAACGAGAAAACACACGTCCAACTCAGTTTGCCT |
| | GTTTTACAGGTTCGCGACGTGCTCGTACGTGGCTTTGGAGACTCCGTGGAGGAGGTCTTATCAGAGG |
| | CACGTCAACATCTTAAAGATGGCACTTGTGGCTTAGTAGAAGTTGAAAAAGGCGTTTTGCCTCAACT |
| | TGAACAGCCCTATGTGTTCATCAAACGTTCGGATGCTCGAACTGCACCTCATGGTCATGTTATGGTT |
| | GAGCTGGTAGCAGAACTCGAAGGCATTCAGTACGGTCGTAGTGGTGAGACACTTGGTGTCCTTGTCC |
| | CTCATGTGGGCGAAATACCAGTGGCTTACCGCAAGGTTCTTCTTCGTAAGAACGGTAATAAAGGAGC |
| | TGGTGGCCATAGTTACGGCGCCGATCTAAAGTCATTTGACTTAGGCGACGAGCTTGGCACTGATCCT |
| | TATGAAGATTTTCAAGAAAACTGGAACACTAAACATAGCAGTGGTGTTACCCGTGAACTCATGCGTG |
| | AGCTTAACGGAGGGGCATACACTCGCTATGTCGATAACAACTTCTGTGGCCCTGATGGCTACCCTCT |
| | TGAGTGCATTAAAGACCTTCTAGCACGTGCTGGTAAAGCTTCATGCACTTTGTCTGAACAACTGGAC |
| | TTTATTGACACTAAGAGGGGTGTATACTGCTGCCGTGAACATGAGCATGAAATTGCTTGGTACACGG |
| | AACGTTCTGAAAAGAGCTATGAATTGCAGACACCTTTTGAAATTAAATTGGCAAAGAAATTTGACAC |
| | CTTCAATGGGGAATGTCCAAATTTTGTATTTCCCTTAAATTCCATAATCAAGACTATTCAACCAAGG |
| | GTTGAAAAGAAAAAGCTTGATGGCTTTATGGGTAGAATTCGATCTGTCTATCCAGTTGCGTCACCAA |
| | ATGAATGCAACCAAATGTGCCTTTCAACTCTCATGAAGTGTGATCATTGTGGTGAAACTTCATGGCA |
| | GACGGGCGATTTTGTTAAAGCCACTTGCGAATTTTGTGGCACTGAGAATTTGACTAAAGAAGGTGCC |
| | ACTACTTGTGGTTACTTACCCCAAAATGCTGTTGTTAAAATTTATTGTCCAGCATGTCACAATTCAG |
| | AAGTAGGACCTGAGCATAGTCTTGCCGAATACCATAATGAATCTGGCTTGAAAACCATTCTTCGTAA |
| | GGGTGGTCGCACTATTGCCTTTGGAGGCTGTGTGTTCTCTTATGTTGGTTGCCATAACAAGTGTGCC |
| | TATTGGGTTCCACGTGCTAGCGCTAACATAGGTTGTAACCATACAGGTGTTGTTGGAGAAGGTTCCG |
| | AAGGTCTTAATGACAACCTTCTTGAAATACTCCAAAAAGAGAAAGTCAACATCAATATTGTTGGTGA |
| | CTTTAAACTTAATGAAGAGATCGCCATTATTTTGGCATCTTTTTCTGCTTCCACAAGTGCTTTTGTG |
| | GAAACTGTGAAAGGTTTGGATTATAAAGCATTCAAACAAATTGTTGAATCCTGTGGTAATTTTAAAG |
| | TTACAAAAGGAAAAGCTAAAAAAGGTGCCTGGAATATTGGTGAACAGAAATCAATACTGAGTCCTCT |
| | TTATGCATTTGCATCAGAGGCTGCTCGTGTTGTACGATCAATTTTCTCCCGCACTCTTGAAACTGCT |
| | CAAAATTCTGTGCGTGTTTTACAGAAGGCCGCTATAACAATACTAGATGGAATTTCACAGTATTCAC |
| | TGAGACTCATTGATGCTATGATGTTCACATCTGATTTGGCTACTAACAATCTAGTTGTAATGGCCTA |
| | CATTACAGGTGGTGTTGTTCAGTTGACTTCGCAGTGGCTAACTAACATCTTTGGCACTGTTTATGAA |
| | AAACTCAAACCCGTCCTTGATTGGCTTGAAGAGAAGTTTAAGGAAGGTGTAGAGTTTCTTAGAGACG |
| | GTTGGGAAATTGTTAAATTTATCTCAACCTGTGCTTGTGAAATTGTCGGTGGACAAATTGTCACCTG |
| | TGCAAAGGAAATTAAGGAGAGTGTTCAGACATTCTTTAAGCTTGTAAATAAATTTTTGGCTTTGTGT |
| | GCTGACTCTATCATTATTGGTGGAGCTAAACTTAAAGCCTTGAATTTAGGTGAAACATTTGTCACGC |
| | ACTCAAAGGGATTGTACAGAAAGTGTGTTAAATCCAGAGAAGAAACTGGCCTACTCATGCCTCTAAA |
| | AGCCCCAAAAGAAATTATCTTCTTAGAGGGAGAAACACTTCCCACAGAAGTGTTAACAGAGGAAGTT |
| | GTCTTGAAAACTGGTGATTTACAACCATTAGAACAACCTACTAGTGAAGCTGTTGAAGCTCCATTGG |
| | TTGGTACACCAGTTTGTATTAACGGGCTTATGTTGCTCGAAATCAAAGACACAGAAAAGTACTGTGC |
| | CCTTGCACCTAATATGATGGTAACAAACAATACCTTCACACTCAAAGGCGGTGCACCAACAAAGGTT |
| | ACTTTTGGTGATGACACTGTGATAGAAGTGCAAGGTTACAAGAGTGTGAATATCACTTTTGAACTTG |
| | ATGAAAGGATTGATAAAGTACTTAATGAGAAGTGCTCTGCCTATACAGTTGAACTCGGTACAGAAGT |
| | AAATGAGTTCGCCTGTGTTGTGGCAGATGCTGTCATAAAAACTTTGCAACCAGTATCTGAATTACTT |
| | ACACCACTGGGCATTGATTTAGATGAGTGGAGTATGGCTACATACTACTTATTTGATGAGTCTGGTG |
| | AGTTTAAATTGGCTTCACATATGTATTGTTCTTTTTACCCTCCAGATGAGGATGAAGAAGAAGGTGA |
| | TTGTGAAGAAGAAGAGTTTGAGCCATCAACTCAATATGAGTATGGTACTGAAGATGATTAGCAAGGT |
| | AAACCTTTGGAATTTGGTGCCACTTCTGCTGCTCTTCAACCTGAAGAAGAGCAAGAAGAAGATTGGT |
| | TAGATGATGATAGTCAACAAACTGTTGGTCAACAAGACGGCAGTGAGGACAATCAGACAACTATTAT |
| | TCAAACAATTGTTGAGGTTCAACCTCAATTAGAGATGGAACTTACACCAGTTGTTCAGACTATTGAA |
| | GTGAATAGTTTTAGTGGTTATTTAAAACTTACTGACAATGTATACATTAAAAATGCAGACATTGTGG |
| | AAGAAGCTAAAAAGGTAAAACCAACAGTGGTTGTTAATGCAGCCAATGTTTACCTTAAACATGGAGG |
| | AGGTGTTGCAGGAGCCTTAAATAAGGCTACTAACAATGCCATGCAAGTTGAATCTGATGATTACATA |
| | GCTACTAATGGACCACTTAAAGTGGGTGGTAGTTGTGTTTTAAGCGGACACAATCTTGCTAAACACT |
| | GTCTTCATGTTGTCGGCCCAAATGTTAACAAAGGTGAAGACATTCAACTTCTTAAGAGTGCTTATGA |
| | AAATTTTAATCAGCACGAAGTTCTACTTGCACCATTATTATCAGCTGGTATTTTTGGTGCTGACCCT |
| | ATACATTCTTTAAGAGTTTGTGTAGATACTGTTCGCACAAATGTCTACTTAGCTGTCTTTGATAAAA |
| | ATCTCTATGACAAACTTGTTTCAAGCTTTTTGGAAATGAAGAGTGAAAAGCAAGTTGAACAAAAGAT |
| | CGCTGAGATTCCTAAAGAGGAAGTTAAGCCATTTATAACTGAAAGTAAACCTTCAGTTGAACAGAGA |
| | AAACAAGATGATAAGAAAATCAAAGCTTGTGTTGAAGAAGTTACAACAACTCTGGAAGAAACTAAGT |
| | TCCTCACAGAAAACTTGTTACTTTATATTGACATTAATGGCAATCTTCATCCAGATTCTGCCACTCT |
| | TGTTAGTGACATTGACATCACTTTCTTAAAGAAAGATGCTCCATATATAGTGGGTGATGTTGTTCAA |
| | GAGGGTGTTTTAACTGCTGTGGTTATACCTACTAAAAAGGCTGGTGGCACTACTGAAATGCTAGCGA |
| | AAGCTTTGAGAAAAGTGCCAACAGACAATTATATAACCACTTACCCGGGTCAGGGTTTAAATGGTTA |
| | CACTGTAGAGGAGGCAAAGACAGTGCTTAAAAAGTGTAAAAGTGCCTTTTACATTCTACCATCTATT |
| | ATCTCTAATGAGAAGCAAGAAATTCTTGGAACTGTTTCTTGGAATTTGCGAGAAATGCTTGCACATG |
| | CAGAAGAAACACGCAAATTAATGCCTGTCTGTGTGGAAACTAAAGCCATAGTTTCAACTATACAGCG |
| | TAAATATAAGGGTATTAAAATACAAGAGGGTGTGGTTGATTATGGTGCTAGATTTTACTTTTACACC |
| | AGTAAAACAACTGTAGCGTCACTTATCAACACACTTAACGATCTAAATGAAACTCTTGTTACAATGC |
| | CACTTGGCTATGTAACACATGGCTTAAATTTGGAAGAAGCTGCTCGGTATATGAGATCTCTCAAAGT |
| | GCCAGCTACAGTTTCTGTTTCTTCACCTGATGCTGTTACAGCGTATAATGGTTATCTTACTTCTTCT |
| | TCTAAAACACCTGAAGAACATTTTATTGAAACCATCTCACTTGCTGGTTCCTATAAAGATTGGTCCT |
| | ATTCTGGACAATCTACACAACTAGGTATAGAATTTCTTAAGAGAGGTGATAAAAGTGTATATTACAC |
| | TAGTAATCCTACCACATTCCACCTAGATGGTGAAGTTATCACCTTTGACAATCTTAAGACACTTCTT |
| | TCTTTGAGAGAAGTGAGGACTATTAAGGTGTTTACAACAGTAGACAACATTAACCTCCACACGCAAG |
| | TTGTGGACATGTCAATGACATATGGACAACAGTTTGGTCCAACTTATTTGGATGGAGCTGATGTTAC |
| | TAAAATAAAACCTCATAATTCACATGAAGGTAAAACATTTTATGTTTTACCTAATGATGACACTCTA |
| | CGTGTTGAGGCTTTTGAGTACTACCACACAACTGATCCTAGTTTTCTGGGTAGGTACATGTCAGCAT |
| | TAAATCACACTAAAAAGTGGAAATACCCACAAGTTAATGGTTTAACTTCTATTAAATGGGCAGATAA |
| | CAACTGTTATCTTGCCACTGCATTGTTAACACTCCAACAAATAGAGTTGAAGTTTAATCCACCTGCT |
| | CTACAAGATGCTTATTACAGAGCAAGGGCTGGTGAAGCTGATAACTTTTGTGCACTTATCTTAGCCT |
| | ACTGTAATAAGACAGTAGGTGAGTTAGGTGATGTTAGAGAAACAATGAGTTACTTGTTTCAACATGC |
| | CAATTTAGATTCTTGCAAAAGAGTCTTGAACGTGGTGTGTAAAACTTGTGGACAACAGCAGACAACC |
| | CTTAAGGGTGTAGAAGCTGTTATGTACATGGGCACACTTTCTTATGAACAATTTAAGAAAGGTGTTC |
| | AGATACCTTGTACGTGTGGTAAACAAGCTACAAAATATCTAGTACAACAGGAGTCACCTTTTGTTAT |
| | GATGTCAGCACCACCTGCTCAGTATGAACTTAAGCATGGTACATTTACTTGTGCTAGTGAGTACACT |
| | GGTAATTACCAGTGTGGTCACTATAAACATATAACTTCTAAAGAAACTTTGTATTGCATAGACGGTG |
| | CTTTACTTACAAAGTCCTCAGAATACAAAGGTCCTATTACGGATGTTTTCTACAAAGAAAACAGTTA |
| | CACAACAACCATAAAACCAGTTACTTATAAATTGGATGGTGTTGTTTGTACAGAAATTGACCCTAAG |
| | TTGGACAATTATTATAAGAAAGACAATTCTTATTTTACAGAGCAACCAATTGATCTTGTACCAAACC |
| | AACCATATCCAAACGCAAGCTTCGATAATTTTAAGTTTGTATGTGATAATATCAAATTTGCTGATGA |
| | TTTAAACCAGTTAACTGGTTATAAGAAACCTGCTTCAAGAGAGCTTAAAGTTACATTTTTCCCTGAC |
| | TTAAATGGTGATGTGGTGGCTATTGATTATAAACACTACACACCCTCTTTTAAGAAAGGAGCTAAAT |
| | TGTTACATAAACCTATTGTTTGGCATGTTAACAATGCAACTAATAAAGCCACGTATAAACCAAATAC |
| | CTGGTGTATACGTTGTCTTTGGAGCACAAAACCAGTTGAAACATCAAATTCGTTTGATGTACTGAAG |
| | TCAGAGGACGCGCAGGGAATGGATAATCTTGCCTGCGAAGATCTAAAACCAGTCTCTGAAGAAGTAG |
| | TGGAAAATCCTACCATACAGAAAGACGTTCTTGAGTGTAATGTGAAAACTACCGAAGTTGTAGGAGA |
| | CATTATACTTAAACCAGCAAATAATAGTTTAAAAATTACAGAAGAGGTTGGCCACACAGATCTAATG |
| | GCTGCTTATGTAGACAATTCTAGTCTTACTATTAAGAAACCTAATGAATTATCTAGAGTATTAGGTT |
| | TGAAAACCCTTGCTACTCATGGTTTAGCTGCTGTTAATAGTGTCCCTTGGGATACTATAGCTAATTA |
| | TGCTAAGCCTTTTCTTAACAAAGTTGTTAGTACAACTACTAACATAGTTACACGGTGTTTAAACCGT |
| | GTTTGTACTAATTATATGCCTTATTTCTTTACTTTATTGCTACAATTGTGTACTTTTACTAGAAGTA |
| | CAAATTCTAGAATTAAAGCATCTATGCCGACTACTATAGCAAAGAATACTGTTAAGAGTGTCGGTAA |
| | ATTTTGTCTAGAGGCTTCATTTAATTATTTGAAGTCACCTAATTTTTCTAAACTGATAAATATTACA |
| | ATTTGGTTTTTACTATTAAGTGTTTGCCTAGGTTCTTTAATCTACTCAACCGCTGCTTTAGGTGTTT |
| | TAATGTCTAATTTAGGCATGCCTTCTTACTGTACTGGTTACAGAGAAGGCTATTTGAACTCTACTAA |
| | TGTCACTATTGCAACCTACTGTACTGGTTCTATACCTTGTAGTGTTTGTCTTAGTGGTTTAGATTCT |
| | TTAGACACCTATCCTTCTTTAGAAACTATACAAATTACCATTTCATCTTTTAAATGGGATTTAACTG |
| | CTTTTGGCTTAGTTGCAGAGTGGTTTTTGGCATATATTCTTTTCACTAGGTTTTTCTATGTACTTGG |
| | ATTGGCTGCAATCATGCAATTGTTTTTCAGCTATTTTGCAGTACATTTTATTAGTAATTCTTGGCTT |
| | ATGTGGTTAATAATTAATCTTGTACAAATGGCCCCGATTTCAGCTATGGTTAGAATGTACATCTTCT |
| | TTGCATCATTTTATTATGTATGGAAAAGTTATGTGCATGTTGTAGACGGTTGTAATTCATCAACTTG |
| | TATGATGTGTTACAAACGTAATAGAGCAACAAGAGTCGAATGTACAACTATTGTTAATGGTGTTAGA |
| | AGGTCCTTTTATGTCTATGCTAATGGAGGTAAAGGCTTTTGCAAACTACACAATTGGAATTGTGTTA |
| | ATTGTGATACATTCTGTGCTGGTAGTACATTTATTAGTGATGAAGTNNNNNNNNNNNNNNNNNNNNN |
| | NNNNNNNNNNNNNNNNNNNNNNNNNNNNNNNNNNNNNNNNNNNNNNNNNNNNNNNNNNNNNNNNNNN |
| | NNNNNNNNNNNNNNNNNNNNNNNNNNNNNNNNNNNNNNNNNNNNNNNNNNNNNNNNNNNNNNNNNNN |
| | NNNNNNNNNNNNNNNNNNNNNNNNNNNNNNNNNNNNNNNNNNNNNNNNNNNNNNNNNNNNNNNNNNN |
| | NNNNNNNNNNNNNNNNNNNNNNNNNNNNNNNNNNNNNNNNNNNNNNNNNNNNNNNNNNNNNNNNNNN |
| | NNNNNNNNTATACTGTTACTAGATCAGGCATTAGTGTCTGATGTTGGTGATAGTGCGGAAGTTGCAG |
| | TTAAAATGTTTGATGCTTACGTTAATACGTTTTCATCAACTTTTAACGTACCAATGGAAAAACTCAA |
| | AACACTAGTTGCAACTGCAGAAGCTGAACTTGCAAAGAATGTGTCCTTAGACAATGTCTTATCTACT |
| | TTTATTTCAGCAGCTCGGCAAGGGTTTGTTGATTCAGATGTAGAAACTAAAGATGTTGTTGAATGTC |
| | TTAAATTGTCACATCAATCTGACATAGAAGTTACTGGCGATAGTTGTAATAACTATATGCTCACCTA |
| | TAACAAAGTTGAAAACATGACACCCCGTGACCTTGGTGCTTGTATTGACTGTAGTGCGCGTCATATT |
| | AATGCGCAGGTAGCAAAAAGTCACAACATTGCTTTGATATGGAACGTTAAAGATTTCATGTCATTGT |
| | CTGAACAACTACGAAAACAAATACGTAGTGCTGCTAAAAAGAATAACTTACCTTTTAAGTTGACATG |
| | TGCAACTACTAGACAAGTTGTTAATGTTGTAACAACAAAGATAGCACTTAAGGGTGGTAAAATTGTT |
| | AATAATTGGTTGAAGCAGTTAATTAAAGTTACACTTGTGTTCCTTTTTGTTGCTGCTATTTTCTATT |
| | TAATAACACCTGTTCATGTCATGTCTAAACATACTGACTTTTCAAGTGAAATCATAGGATACAAGGC |
| | TATTGATGGTGGTGTCACTCGTGACATAGCATCTACAGATACTTGTTTTGCTAACAAACATGCTGAT |
| | TTTGACACATGGTTTAGCCAGCGTGGTGGTAGTTATACTAATGACAAAGCTTGCCCATTGATTGCTG |
| | CAGTCATAACAAGAGAAGTGGGTTTTGTCGTGCCTGGTTTGCCTGGCACGATATTACGCACAACTAA |
| | TGGTGACTTTTTGCATTTCTTACCTAGAGTTTTTAGTGCAGTTGGTAACATCTGTTACACACCATCA |
| | AAACTTATAGAGTACACTGACTTTGCAACATCAGCTTGTGTTTTGGCTGCTGAATGTACAATTTTTA |
| | AAGATGCTTCTGGTAAGCCAGTACCATATTGTTATGATACCAATGTACTAGAAGGTTCTGTTGCTTA |
| | TGAAAGTTTACGCCCTGACACACGTTATGTGCTCATGGATGGCTCTATTATTCAATTTCCTAACACC |
| | TACCTTGAAGGTTCTGTTAGAGTGGTAACAACTTTTGATTCTGAGTACTGTAGGCACGGCACTTGTG |
| | AAAGATCAGAAGCTGGTGTTTGTGTATCTACTAGTGGTAGATGGGTACTTAACAATGATTATTACAG |
| | ATCTTTACCAGGAGTTTTCTGTGGTGTAGATGCTGTAAATTTACTTACTAATATGTTTACACCACTA |
| | ATTCAACCTATTGGTGCTTTGGACATATCAGCATCTATAGTAGCTGGTGGTATTGTAGCTATCGTAG |
| | TAACATGCCTTGCCTACTATTTTATGAGGTTTAGAAGAGCTTTTGGTGAATACAGTCATGTAGTTGC |
| | CTTTAATACTTTACTATTCCTTATGTCATTCACTGTACTCTGTTTAACACCAGTTTACTCATTCTTA |
| | CCTGGTGTTTATTCTGTTATTTACTTGTACTTGACATTTTATCTTACTAATGATGTTTCTTTTTTAG |
| | CACATATTCAGTGGATGGTTATGTTCACACCTTTAGTACCTTTCTGGATAACAATTGCTTATATCAT |
| | TTGTATTTCCACAAAGCATTTCTATTGGTTCTTTAGTAATTACCTAAAGAGACGTGTAGTCTTTAAT |
| | GGTGTTTCCTTTAGTACTTTTGAAGAAGCTGCGCTGTGCACCTTTTTGTTAAATAAAGAAATGTATC |
| | TAAAGTTGCGTAGTGATGTGCTATTACCTCTTACGCAATATAATAGATACTTAGCTCTTTATAATAA |
| | GTACAAGTATTTTAGTGGAGCAATGGATACAACTAGCTACAGAGAAGCTGCTTGTTGTCATCTCGCA |
| | AAGGCTCTCAATGACTTCAGTAACTCAGGTTCTGATGTTCTTTACCAACCACCACAAACCTCTATCA |
| | CCTCAGCTGTTTTGCAGAGTGGTTTTAGAAAAATGGCATTCCCATCTGGTAAAGTTGAGGGTTGTAT |
| | GGTACAAGTAACTTGTGGTACAACTACACTTAACGGTCTTTGGCTTGATGACGTAGTTTACTGTCCA |
| | AGACATGTGATCTGCACCTCTGAAGACATGCTTAACCCTAATTATGAAGATTTACTCATTCGTAAGT |
| | CTAATCATAATTTCTTGGTACAGGCTGGTAATGTTCAACTCAGGGTTATTGGACATTCTATGCAAAA |
| | TTGTGTACTTAAGCTTAAGGTTGATACAGCCAATCCTAAGACACCTAAGTATAAGTTTGTTCGCATT |
| | CAACCAGGACAGACTTTTTCAGTGTTAGCTTGTTACAATGGTTCACCATCTGGTGTTTACCAATGTG |
| | CTATGAGGCCCAATTTCACTATTAAGGGTTCATTCCTTAATGGTTCATGTGGTAGTGTTGGTTTTAA |
| | CATAGATTATGACTGTGTCTCTTTTTGTTACATGCACCATATGGAATTACCAACTGGAGTTCATGCT |
| | GGCACAGACTTAGAAGGTAACTTTTATGGACCTTTTGTTGACAGGCAAACAGCACAAGCAGCTGGTA |
| | CGGACACAACTATTACAGTTAATGTTTTAGCTTGGTTGTACGCTGCTGTTATAAATGGAGACAGGTG |
| | GTTTCTCAATCGATTTACCACAACTCTTAATGACTTTAACCTTGTGGCTATGAAGTACAATTATGAA |
| | CCTCTAACACAAGACCATGTTGACATACTAGGACCTCTTTCTGCTCAAACTGGAATTGCCGTTTTAG |
| | ATATGTGTGCTTCATTAAAAGAATTACTGCAAAATGGTATGAATGGACGTACCATATTGGGTAGTGC |
| | TTTATTAGAAGATGAATTTACACCTTTTGATGTTGTTAGACAATGCTCAGGTGTTACTTTCCAAAGT |
| | GCAGTGAAAAGAACAATCAAGGGTACACACCACTGGTTGTTACTCACAATTTTGACTTCACTTTTAG |
| | TTTTAGTCCAGAGTACTCAATGGTCTTTGTTCTTTTTTTTGTATGAAAATGCCTTTTTACCTTTTGC |
| | TATGGGTATTATTGCTATGTCTGCTTTTGCAATGATGTTTGTCAAACATAAGCATGCATTTCTCTGT |
| | TTGTTTTTGTTACCTTCTCTTGCCACTGTAGCTTATTTTAATATGGTCTATATGCCTGCTAGTTGGG |
| | TGATGCGTATTATGACATGGTTGGATATGGTTGATACTAGTTTGAAGCTAAAAGACTGTGTTATGTA |
| | TGCATCAGCTGTAGTGTTACTAATCCTTATGACAGCAAGAACTGTGTATGATGATGGTGCTAGGAGA |
| | GTGTGGACACTTATGAATGTCTTGACACTCGTTTATAAAGTTTATTATGGTAATGCTTTAGATCAAG |
| | CCATTTCCATGTGGGCTCTTATAATCTCTGTTACTTCTAACTACTCAGGTGTAGTTACAACTGTCAT |
| | GTTTTTGGCCAGAGGTATTGTTTTTATGTGTGTTGAGTATTGCCCTATTTTCTTCATAACTGGTAAT |
| | ACACTTCAGTGTATAATGCTAGTTTATTGTTTCTTAGGCTATTTTTGTACTTGTTACTTTGGCCTCT |
| | TTTGTTTACTCAACCGCTACTTTAGACTGACTCTTGGTGTTTATGATTACTTAGTTTCTACACAGGA |
| | GTTTAGATATATGAATTCACAGGGACTACTCCCACCCAAGAATAGCATAGATGCCTTCAAACTCAAC |
| | ATTAAATTGTTGGGTGTTGGTGGCAAACCTTGTATCAAAGTAGCCACTGTACAGTCTAAAATGTCAG |
| | ATGTAAAGTGCACATCAGTAGTCTTACTCTCAGTTTTGCAACAACTCAGAGTAGAATCATCATCTAA |
| | ATTGTGGGCTCAATGTGTCCAGTTACACAATGACATTCTCTTAGCTAAAGATACTACTGAAGCCTTT |
| | GAAAAAATGGTTTCACTACTTTCTGTTTTGCTTTCCATGCAGGGTGCTGTAGACATAAACAAGCTTT |
| | GTGAAGAAATGCTGGACAACAGGGCAACCTTACAAGCTATAGCCTCAGAGTTTAGTTCCCTTCCATC |
| | ATATGCAGCTTTTGCTACTGCTCAAGAAGCTTATGAGCAGGCTGTTGCTAATGGTGATTCTGAAGTT |
| | GTTCTTAAAAAGTTGAAGAAGTCTTTGAATGTGGCTAAATCTGAATTTGACCGTGATGCAGCCATGC |
| | AACGTAAGTTGGAAAAGATGGCTGATCAAGCTATGACCCAAATGTATAAACAGGCTAGATCTGAGGA |
| | CAAGAGGGCAAAAGTTACTAGTGCTATGCAGACAATGCTTTTCACTATGCTTAGAAAGTTGGATAAT |
| | GATGCACTCAACAACATTATCAACAATGCAAGAGATGGTTGTGTTCCCTTGAACATAATACCTCTTA |
| | CAACAGCAGCCAAACTAATGGTTGTCATACCAGACTATAACACATATAAAAATACGTGTGATGGTAC |
| | AACATTTACTTATGCATCAGCATTGTGGGAAATCCAACAGGTTGTAGATGCAGATAGTAAAATTGTT |
| | CAACTTAGTGAAATTAGTATGGACAATTCACCTAATTTAGCATGGCCTCTTATTGTAACAGCTTTAA |
| | GGGCCAATTCTGCTGTCAAATTACAGAATAATGAGCTTAGTCCTGTTGCACTACGACAGATGTCTTG |
| | TGCTGCCGGTACTACACAAACTGCTTGCACTGATGACAATGCGTTAGCTTACTACAACACAACAAAG |
| | GGAGGTAGGTTTGTACTTGCACTGTTATCCGATTTACAGGATTTGAAATGGGCTAGATTCCCTAAGA |
| | GTGATGGAACTGGTACTATCTATACAGAACTGGAACCACCTTGTAGGTTTGTTACAGACACACCTAA |
| | AGGTCCTAAAGTGAAGTATTTATACTTTATTAAAGGATTAAACAACCTAAATAGAGGTATGGTACTT |
| | GGTAGTTTAGCTGCCACAGTACGTCTACAAGCTGGTAATGCAACAGAAGTGCCTGCCAATTCAACTG |
| | TATTATCTTTCTGTGCTTTTGCTGTAGATGCTGCTAAAGCTTACAAAGATTATCTAGCTAGTGGGGG |
| | ACAACCAATCACTAATTGTGTTAAGATGTTGTGTACACACACTGGTACTGGTCAGGCAATAACAGTT |
| | ACACCGGAAGCCAATATGGATCAAGAATCCTTTGGTGGTGCATCGTGTTGTCTGTACTGCCGTTGCC |
| | ACATAGATCATCCAAATCCTAAAGGATTTTGTGACTTAAAAGGTAAGTATGTACAAATACCTACAAC |
| | TTGTGCTAATGACCCTGTGGGTTTTACACTTAAAAACACAGTCTGTACCGTCTGCGGTATGTGGAAA |
| | GGTTATGGCTGTAGTTGTGATCAACTCCGCGAACCCATGCTTCAGTCAGCTGATGCACAATCGTTTT |
| | TAAACGGGTTTGCGGTGTAAGTGCAGCCCGTCTTACACCGTGCGGCACAGGCACTAGTACTGATGTC |
| | GTATACAGGGCTTTTGACATCTACAATGATAAAGTAGCTGGTTTTGCTAAATTCCTAAAAACTAATT |
| | GTTGTCGCTTCCAAGAAAAGGACGAAGATGACAATTTAATTGATTCTTACTTTGTAGTTAAGAGACA |
| | CACTTTCTCTAACTACCAACATGAAGAAACAATTTATAATTTACTTAAGGATTGTCCAGCTGTTGCT |
| | AAACATGACTTCTTTAAGTTTAGAATAGACGGTGACATGGTACCACATATATCACGTCAACGTCTTA |
| | CTAAATACACAATGGCAGACCTCGTCTATGCTTTAAGGCATTTTGATGAAGGTAATTGTGACACATT |
| | AAAAGAAATACTTGTCACATACAATTGTTGTGATGATGATTATTTCAATAAAAAGGACTGGTATGAT |
| | TTTGTAGAAAACCCAGATATATTACGCGTATACGCCAACTTAGGTGAACGTGTACGCCAAGCTTTGT |
| | TAAAAACAGTACAATTCTGTGATGCCATGCGAAATGCTGGTATTGTTGGTGTACTGACATTAGATAA |
| | TCAAGATCTCAATGGTAACTGGTATGATTTCGGTGATTTCATACAAACCACGCCAGGTAGTGGAGTT |
| | CCTGTTGTAGATTCTTATTATTCATTGTTAATGCCTATATTAACCTTGACCAGGGCTTTAACTGCAG |
| | AGTCACATGTTGACACTGACTTAACAAAGCCTTACATTAAGTGGGATTTGTTAAAATATGACTTCAC |
| | GGAAGAGAGGTTAAAACTCTTTGACCGTTATTTTAAATATTGGGATCAGACATACCACCCAAATTGT |
| | GTTAACTGTTTGGATGACAGATGCATTCTGCATTGTGCAAACTTTAATGTTTTATTCTCTACAGTGT |
| | TCCCACTTACAAGTTTTGGACCACTAGTGAGAAAAATATTTGTTGATGGTGTTCCATTTGTAGTTTC |
| | AACTGGATACCACTTCAGAGAGCTAGGTGTTGTACATAATCAGGATGTAAACTTACATAGCTCTAGA |
| | CTTAGTTTTAAGGAATTACTTGTGTATGCTGCTGACCCTGCTATGCACGCTGCTTCTGGTAATCTAT |
| | TACTAGATAAACGCACTACGTGCTTTTCAGTAGCTGCACTTACTAACAATGTTGCTTTTCAAACTGT |
| | CAAACCTGGTAATTTTAACAAAGACTTCTATGACTTTGCTGTGTCTAAGGGTTTCTTTAAGGAAGGA |
| | AGTTCTGTTGAATTAAAACACTTCTTCTTTGCTCAGGATGGTAATGCTGCTATCAGCGATTATGACT |
| | ACTATCGTTATAATCTACCAACAATGTGTGATATCAGACAACTACTATTTGTAGTTGAAGTTGTTGA |
| | TAAGTACTTTGATTGTTACGATGGTGGCTGTATTAATGCTAACCAAGTCATCGTCAACAACCTAGAC |
| | AAATCAGCTGGTTTTCCATTTAATAAATGGGGTAAGGCTAGACTTTATTATGATTCAATGAGTTATG |
| | AGGATCAAGATGCACTTTTCGCATATACAAAACGTAATGTCATCCCTACTATAACTCAAATGAATCT |
| | TAAGTATGCCATTAGTGCAAAGAACAGAGCTCGCACCGTAGCTGGTGTCTCTATCTGTAGTACTATG |
| | ACCAATAGACAGTTTCATCAAAAATTATTGAAATCAATAGCCGCCACTAGAGGAGCTACTGTAGTAA |
| | TTGGAACAAGCAAATTCTATGGTGGTTGGCACAACATGTTAAAAACTGTTTATAGTGATGTAGAAAA |
| | CCCTCATCTTATGGGTTGGGATTATCCTAAATGTGATAGAGCCATGCCTAACATGCTTAGAATTATG |
| | GCCTCACTTGTTCTTGCTCGCAAACATACAACGTGTTGTAGCTTGTCACACCGTTTCTATAGATTAG |
| | CTAATGAGTGTGCTCAAGTATTGAGTGAAATGGTCATGTGTGGCGGTTCACTATATGTTAAACCAGG |
| | TGGAACCTCATCAGGAGATGCCACAACTGCTTATGCTAATAGTGTTTTTAACATTTGTCAAGCTGTC |
| | ACGGCCAATGTTAATGCACTTTTATCTACTGATGGTAACAAAATTGCCGATAAGTATGTCCGCAATT |
| | TACAACACAGACTTTATGAGTGTCTCTATAGAAATAGAGATGTTGACACAGACTTTGTGAATGAGTT |
| | TTACGCATATTTGCGTAAACATTTCTCAATGATGATACTCTCTGACGATGCTGTTGTGTGTTTCAAT |
| | AGCACTTATGCATCTCAAGGTCTAGTGGCTAGCATAAAGAACTTTAAGTCAGTTCTTTATTATCAAA |
| | ACAATGTTTTTATGTCTGAAGCAAAATGTTGGACTGAGACTGACCTTACTAAAGGACCTCATGAATT |
| | TTGCTCTCAACATACAATGCTAGTTAAACAGGGTGATGATTATGTGTACCTTCCTTACCCAGATCCA |
| | TCAAGAATCCTAGGGGCCGGCTGTTTTGTAGATGATATCGTAAAAACAGATGGTACACTTATGATTG |
| | AACGGTTCGTGTCTTTAGCTATAGATGCTTACCCACTTACTAAACATCCTAATCAGGAGTATGCTGA |
| | TGTCTTTCATTTGTACTTACAATACATAAGAAAGCTACATGATGAGTTAACAGGACACATGTTAGAC |
| | ATGTATTCTGTTATGCTTACTAATGATAACACCTCAAGGTATTGGGAACCTGAGTTTTATGAGGCTA |
| | TGTACACACCGCATACAGTCTTACAGGCTGTTGGGGCTTGTGTTCTTTGCAATTCACAGACTTCATT |
| | AAGATGTGGTGCTTGCATACGTAGACCATTCTTATGTTGTAAATGCTGTTACGACCATGTCATATCA |
| | ACATCACATAAATTAGTCTTGTCTGTTAATCCGTATGTTTGCAATGCTCCAGGTTGTGATGTCACAG |
| | ATGTGACTCAACTTTACTTAGGAGGTATGAGCTATTATTGTAAATCACATAAACCACCCATTAGTTT |
| | TCCATTGTGTGCTAATGGACAAGTTTTTGGTTTATATAAAAATACATGTGTTGGTAGCGATAATGTT |
| | ACTGACTTTAATGCAATTGCAACATGTGACTGGACAAATGCTGGTGATTACATTTTAGCTAACACCT |
| | GTACTGAAAGACTCAAGCTTTTTGCAGCAGAAACGCTCAAAGCTACTGAGGAGACATTTAAACTGTC |
| | TTATGGTATTGCTACTGTACGTGAAGTGCTGTCTGACAGAGAATTACATCTTTCATGGGAAGTTGGT |
| | AAACCTAGACCACCACTTAACCGAAATTATGTCTTTACTGGTTATCGTGTAACTAAAAACAGTAAAG |
| | TACAAATAGGAGAGTACACCTTTGAAAAAGGTGACTATGGTGATGCTGTTGTTTACCGAGGTACAAC |
| | AACTTACAAATTAAATGTTGGTGATTATTTTGTGCTGACATCACATACAGTAATGCCATTAAGTGCA |
| | CCTACACTAGTGCCACAAGAGCACTATGTTAGAATTACTGGCTTATACCCAACACTCAATATCTCAG |
| | ATGAGTTTTCTAGCAATGTTGCAAATTATCAAAAGGTTGGTATGCAAAAGTATTCTACACTCCAGGG |
| | ACCACCTGGTACTGGTAAGAGTCATTTTGCTATTGGCCTAGCTCTCTACTACCCTTCTGCTCGCATA |
| | GTGTATACAGCTTGCTCTCATGCCGCTGTTGATGCACTATGTGAGAAGGCATTAAAATATTTGCCTA |
| | TAGATAAATGTAGTAGAATTATACCTGCACGTGCTCGTGTAGAGTGTTTTGATAAATTCAAAGTGAA |
| | TTCAACATTAGAACAGTATGTCTTTTGTACTGTAAATGCATTGCCTGAGACGACAGCAGATATAGTT |
| | GTCTTTGATGAAATTTCAATGGCCACAAATTATGATTTGAGTGTTGTCAATGCCAGATTACGTGCTA |
| | AGCACTATGTGTACATTGGCGACCCTGCTCAATTACCTGCACCACGCACATTGCTAACTAAGGGCAC |
| | ACTAGAACCAGAATATTTCAATTCAGTGTGTAGACTTATGAAAACTATAGGTCCAGACATGTTCCTC |
| | GGAACTTGTCGGCGTTGTCCTGCTGAAATTGTTGACACTGTGAGTGCTTTGGTTTATGATAATAAGC |
| | TTAAAGCACATAAAGACAAATCAGCTCAATGCTTTAAAATGTTTTATAAGGGTGTTATCACGCATGA |
| | TGTTTCATCTGCAATTAACAGGCCACAAATAGGCGTGGTAAGAGAATTCCTTACACGTAACCCTGCT |
| | TGGAGAAAAGCTGTCTTTATTTCACCTTATAATTCACAGAATGCTGTAGCCTCAAAGATTTTGGGAC |
| | TACCAACTCAAACTGTTGATTCATCACAGGGCTCAGAATATGACTATGTCATATTCACTCAAACCAC |
| | TGAAACAGCTCACTCTTGTAATGTAAACAGATTTAATGTTGCTATTACCAGAGCAAAAGTAGGCATA |
| | CTTTGCATAATGTCTGATAGAGACCTTTATGACAAGTTGCAATTTACAAGTCTTGAAATTCCACGTA |
| | GGAATGTGGCAACTTTACAAGCTGAAAATGTAACAGGACTCTTTAAAGATTGTAGTAAGGTAATCAC |
| | TGGGTTACATCCTACACAGGCACCTACACACCTCAGTGTTGACACTAAATTCAAAACTGAAGGTTTA |
| | TGTGTTGACATACCTGGCATACCTAAGGACATGACCTATAGAAGACTCATCTCTATGATGGGTTTTA |
| | AAATGAATTATCAAGTTAATGGTTACCCTAACATGTTTATCACCCGCGAAGAAGCTATAAGACATGT |
| | ACGTGCATGGATTGGCTTCGATGTCGAGGGGTGTCATGCTACTAGAGAAGCTGTTGGTACCAATTTA |
| | CCTTTACAGCTAGGTTTTTCTACAGGTGTTAACCTAGTTGCTGTACCTACAGGTTATGTTGATACAC |
| | CTAATAATACAGATTTTTCCAGAGTTAGTGCTAAACCACCGCCTGGAGATCAATTTAAACACCTCAT |
| | ACCACTTATGTACAAAGGACTTCCTTGGAATGTAGTGCGTATAAAGATTGTACAAATGTTAAGTGAC |
| | ACACTTAAAAATCTCTCTGACAGAGTCGTATTTGTCTTATGGGCACATGGCTTTGAGTTGACATCTA |
| | TGAAGTATTTTGTGAAAATAGGACCTGAGCGCACCTGTTGTCTATGTGATAGACGTGCCACATGCTT |
| | TTCCACTGCTTCAGACACTTATGCCTGTTGGCATCATTCTATTGGATTTGATTACGTCTATAATCCG |
| | TTTATGATTGATGTTCAACAATGGGGTTTTACAGGTAACCTACAAAGCAACCATGATCTGTATTGTC |
| | AAGTCCATGGTAATGCACATGTAGCTAGTTGTGATGCAATCATGACTAGGTGTCTAGCTGTCCACGA |
| | GTGCTTTGTTAAGCGTGTTGACTGGACTATTGAATATCCTATAATTGGTGATGAACTGAAGATTAAT |
| | GCGGCTTGTAGAAAGGTTCAACACATGGTTGTTAAAGCTGCATTATTAGCAGACAAATTCCCAGTTC |
| | TTCACGACATTGGTAACCCTAAAGCTATTAAGTGTGTACCTCAAGCTGATGTAGAATGGAAGTTCTA |
| | TGATGCACAGCCTTGTAGTGACAAAGCTTATAAAATAGAAGAATTATTCTATTCTTATGCCACACAT |
| | TCTGACAAATTCACAGATGGTGTATGCCTATTTTGGAATTGCAATGTCGATAGATATCCTGCTAATT |
| | CCATTGTTTGTAGATTTGACACTAGAGTGCTATCTAACCTTAACTTGCCTNNNNNNNNNNNNNNNNN |
| | NNNNNNNNNNNNNNNNNNNNNNNNNNNNNNNNNNNNNNNNNNNNNNNNNNNNNNNNNNNNNNNNNNN |
| | NNNNNNNNNNNNNNNNNNNNNNNNNNNNNNNNNNNNNNNNNNNNNNNNNNNNNNNNNNNNNNNNNNN |
| | NNNNNNNNNNNNNNNNNNNNNNNNNNNNNNNNNNNNNNNNNNNNNNNNNNNNNNNNNNNNNNNNNNN |
| | NNNNNNNNNNNNNNNNNNNNNNNNNNNNNNNNNNNNNNNNNNNNNNNNNNNNNNNNNNNNNNNNNNN |
| | NNNNNNNNNNACAAACAATTTGATACTTATAACCTCTGGAACACTTTTACAAGACTTCAGAGTTTAG |
| | AAAATGTGGCTTTTAATGTTGTAAATAAGGGACACTTTGATGGACAACAGGGTGAAGTACCAGTTTC |
| | TATCATTAATAACACTGTTTACACAAAAGTTGATGGTGTTGATGTAGAATTGTTTGAAAATAAAACA |
| | ACATTACCTGTTAATGTAGCATTTGAGCTTTGGGCTAAGCGCAACATTAAACCAGTACCAGAGGTGA |
| | AAATACTCAATAATTTGGGTGTGGACATTGCTGCTAATACTGTGATCTGGGACTACAAAAGAGATGC |
| | TCCAGCACATATATCTACTATTGGTGTTTGTTCTATGACTGACATAGCCAAGAAACCAACTGAAACG |
| | ATTTGTGCACCACTCACTGTCTTTTTTGATGGTAGAGTTGATGGTCAAGTAGACTTATTTAGAAATG |
| | CCCGTAATGGTGTTCTTATTACAGAAGGTAGTGTTAAAGGTTTACAACCATCTGTAGGTCCCAAACA |
| | AGCTAGTCTTAATGGAGTCACATTAATTGGAGAAGCCGTAAAAACACAGTTCAATTATTATAAGAAA |
| | GTTGATGGTGTTGTCCAACAATTACCTGAAACTTACTTTACTCAGAGTAGAAATTTACAAGAATTTA |
| | AACCCAGGAGTCAAATGGAAATTGATTTCTTAGAATTAGCTATGGATGAATTCATTGAACGGTATAA |
| | ATTAGAAGGCTATGCCTTCGAACATATCGTTTATGGAGATTTTAGTCATAGTCAGTTAGGTGGTTTA |
| | CATCTACTGATTGGACTAGCTAAACGTTTTAAGGAATCACCTTTTGAATTAGAAGATTTTATTCCTA |
| | TGGACAGTACAGTTAAAAACTATTTCATAACAGATGCGCAAACAGGTTCATCTAAGTGTGTGTGTTC |
| | TGTTATTGATTTATTACTTGATGATTTTGTTGAAATAATAAAATCCCAAGATTTATCTGTAGTTTCT |
| | AAGGTTGTCAAAGTGACTATTGACTATACAGAAATTTCATTTATGCTTTGGTGTAAAGATGGCCATG |
| | TAGAAACATTTTACCCAAAATTACAATCTAGTCAAGCGTGGCAACCGGGTGTTGCTATGCCTAATCT |
| | TTACAAAATGCAAAGAATGCTATTAGAAAATTGTGACCTTCAAAATTATGGTGATAGTGCAACATTA |
| | CCTAAAGGCATAATGATGAATGTCGCAAAATATACTCAACTGTGTCAATATTTAAACACATTAACAT |
| | TAGCTGTACCCTATAATATGAGAGTTATACATTTTGGTGCTGGTTCTGATAAAGGAGTTGCACCAGG |
| | TACAGCTGTTTTAAGACAGTGGTTGCCTACGGGTACGCTGCTTGTCGATTCAGATCTTAATGACTTT |
| | GTCTCTGATGCAGATTCAACTTTGATTGGTGATTGTGCAACTGTACATACAGCTAATAAATGGGATC |
| | TCATTATTAGTGATATGTACGACCCTAAGACTAAAAATGTTACAAAAGAAAATGACTCTAAAGAGGG |
| | TTTTTTCACTTACATTTGTGGGTTTATACAANAAAAGCTAGCTCTTGGAGGTTCCGTGGCTATAAAG |
| | ATAACAGAACATTCTTGGAATGCTGATCTTTATAAGCTCATGGGACACTTCGCATGGTGGACAGCCT |
| | TTGTTACTAATGTGAATGCGTCATCATCTGAAGCATTTTTAATTGGATGTAATTATCTTGGCAAACC |
| | ACGCGAACAAATAGATGGTTATGTCATGCATGCAAATTACATATTTTGGAGGAATACAAATCCAATT |
| | CAGTTGTCTTCCTATTCTTTATTTGACATGAGTAAATTTCCCCTTAAATTAAGGGGTACTGCTGTTA |
| | TGTCTTTAAAAGAAGGTCAAATCAATGATATGATTTTATCTCTTCTTAGTAAAGGTAGACTTATAAT |
| | TAGAGAAAACAACAGAGTTGTTATTTCTAGTGATGTTCTTGTTAACAACTAAACGAACAATGTTTGT |
| | TTTTCTTGTTTTATTGCCACTAGTCTCTAGTCAGTGTGTTAATCTTACAACCAGAACTCAATTACCC |
| | CCTGCATACACTAATTCTTTCACACGTGGTGTTTATTACCCTGACAAAGTTTTCAGATCCTCAGTTT |
| | TACATTCAACTCAGGACTTGTTCTTACCTTTCTTTTCCAATGTTACTTGGTTCCATGCTATCTCTGG |
| | GACCAATGGTACTAAGAGGTTTGATAACCCTGTCCTACCATTTAATGATGGTGTTTATTTTGCTTCC |
| | ACTGAGAAGTCTAACATAATAAGAGGCTGGATTTTTGGTACTACTTTAGATTCGAAGACCCAGTCCC |
| | TACTTATTGTTAATAACGCTACTAATGTTGTTATTAAAGTCTGTGAATTTCAATTTTGTAATGATCC |
| | ATTTTTGGGTGTTTACCACAAAAACAACAAAAGTTGGATGGAAAGTGAGTTCAGAGTTTATTCTAGT |
| | GCGAATAATTGCACTTTTGAATATGTCTCTCAGCCTTTTCTTATGGACCTTGAAGGAAAACAGGGTA |
| | ATTTCAAAAATCTTAGGGAATTTGTGTTTAAGAATATTGATGGTTATTTTAAAATATATTCTAAGCA |
| | CACGCCTATTAATTTAGTGCGTGATCTCCCTCAGGGTTTTTCGGCTTTAGAACCATTGGTAGATTTG |
| | CCAATAGGTATTAACATCACTAGGTTTCAAACTTTACTTGCTTTACATAGAAGTTATTTGACTCCTG |
| | GTGATTCTTCTTCAGGTTGGACAGCTGGTGCTGCAGCTTATTATGTGGGTTATCTTCAACCTAGGAC |
| | TTTTCTATTAAAATATAATGAAAATGGAACCATTACAGATGCTGTAGACTGTGCACTTGACCCTCTC |
| | TCAGAAACAAAGTGTACGTTGAAATCCTTCACTGTAGAAAAAGGAATCTATCAAACTTCTAACTTTA |
| | GAGTCCAACCAACAGAATCTATTGTTAGATTTCCTAATATTACAAACTTGTGCCCTTTTGGTGAAGT |
| | TTTTAACGCCACCAGATTTGCATCTGTTTATGCTTGGAACAGGAAGAGAATCAGCAACTGTGTTGCT |
| | GATTATTCTGTCCTATATAATTCCGCATCATTTTCCACTTTTAAGTGTTATGGAGTGTCTCCTACTA |
| | AATTAAATGATCTCTGCTTTACTAATGTCTATGCAGATTCATTTGTAATTAGAGGTGATGAAGTCAG |
| | ACAAATCGCTCCAGGGCAAACTGGAAAGATTGCTGATTATAATTATAAATTACCAGATGATTTTACA |
| | GGCTGCGTTATAGCTTGGAATTCTAACAATCTTGATTCTAAGGTTGGTGGTAATTATAATTACCTGT |
| | ATAGATTGTTTAGGAAGTCTAATCTCAAACCTTTTGAGAGAGATATTTCAACTGAAATCTATCAGGC |
| | CGGTAGCACACCTTGTAATGGTGTTGAAGGTTTTAATTGTTACTTTCCTTTACAATCATATGGTTTC |
| | CAACCCACTTATGGTGTTGGTTACCAACCATACAGAGTAGTAGTACTTTCTTTTGAACTTCTACATG |
| | CACCAGCAACTGTTTGTGGACCTAAAAAGTCTACTAATTTGGTTAAAAACAAATGTGTCAATTTCAA |
| | CTTCAATGGTTTAACAGGCACAGGTGTTCTTACTGAGTCTAACAAAAAGTTTCTGCCTTTCCAACAA |
| | TTTGGCAGAGACATTGATGACACTACTGATGCTGTCCGTGATCCACAGACACTTGAGATTCTTGACA |
| | TTACACCATGTTCTTTTGGTGGTGTCAGTGTTATAACACCAGGAACAAATACTTCTAACCAGGTTGC |
| | TGTTCTTTATCAGGGTGTTAACTGCACAGAAGTCCCTGTTGCTATTCATGCAGATCAACTTACTCCT |
| | ACTTGGCGTGTTTATTCTACAGGTTCTAATGTTTTTCAAACACGTGCAGGCTGTTTAATAGGGGCTG |
| | AACATGTCAACAACTCATATGAGTGTGACATACCCATTGGTGCAGGTATATGCGCTAGTTATCAGAC |
| | TCAGACTAATTCTCATCGGCGGGCACGTAGTGTAGCTAGTCAATCCATCATTGCCTACACTATGTCA |
| | CTTGGTGCAGAAAATTCAGTTGCTTACTCTAATAACTCTATTGCCATACCCATAAATTTTACTATTA |
| | GTGTTACCACAGAAATTCTACCAGTGTCTATGACCAAGACATCAGTAGATTGTACAATGTACATTTG |
| | TGGTGATTCAACTGAATGCAGCAATCTTTTGTTGCAATATGGCAGTTTTTGTACACAATTAAACCGT |
| | GCTTTAACTGGAATAGCTGTTGAACAAGACAAAAACACCCAAGAAGTTTTTGCACAAGTCAAACAAA |
| | TTTACAAAACACCACCAATTAAAGATTTTGGTGGTTTTAATTTTTCACAAATATTACCAGATCCATC |
| | AAAACCAAGCAAGAGGTCATTTATTGAAGATCTACTTTTCAACAAAGTGACACTTGCAGATGCTGGC |
| | TTCATCAAACAATATGGTGATTGCCTTGGTGATATTGCTGCTAGAGACCTCATTTGTGCACAAAAGT |
| | TTAACGGCCTTACTGTTTTGCCACCTTTGCTCACAGATGAAATGATTGCTCAATACACTTCTGCACT |
| | GTTAGCGGGTACAATCACTTCTGGTTGGACCTTTGGTGCAGGTGCTGCATTACAAATACCATTTGCT |
| | ATGCAAATGGCTTATAGGTTTAATGGTATTGGAGTTACACAGAATGTTCTCTATGAGAACCAAAAAT |
| | TGATTGCCAACCAATTTAATAGTGCTATTGGCAAAATTCAAGACTCACTTTCTTCCACAGCAAGTGC |
| | ACTTGGAAAACTTCAAGATGTGGTCAACCAAAATGCACAAGCTTTAAACACGCTTGTTAAACAACTT |
| | AGCTCCAATTTTGGTGCAATTTCAAGTGTTTTAAATGATATCCTTGCACGTCTTGACAAAGTTGAGG |
| | CTGAAGTGCAAATTGATAGGTTGATCACAGGCAGACTTCAAAGTTTGCAGACATATGTGACTCAACA |
| | ATTAATTAGAGCTGCAGAAATCAGAGCTTCTGCTAATCTTGCTGCTACTAAAATGTCAGAGTGTGTA |
| | CTTGGACAATCAAAAAGAGTTGATTTTTGTGGAAAGGGCTATCATCTTATGTCCTTCCCTCAGTCAG |
| | CACCTCATGGTGTAGTCTTCTTGCATGTGACTTATGTCCCTGCACAAGAAAAGAACTTCACAACTGC |
| | TCCTGCCATTTGTCATGATGGAAAAGCACACTTTCCTCGTGAAGGTGTCTTTGTTTCAAATGGCACA |
| | CACTGGTTTGTAACACAAAGGAATTTTTATGAACCACAAATCATTACTACACACAACACATTTGTGT |
| | CTGGTAACTGTGATGTTGTAATAGGAATTGTCAACAACACAGTTTATGATCCTTTGCAACCTGAATT |
| | AGACTCATTCAAGGAGGAGTTAGATAAATATTTTAAGAATCATACATCACCAGATGTTGATTTAGGT |
| | GACATCTCTGGCATTAATGCTTCAGTTGTAAACATTCAAAAAGAAATTGACCGCCTCAATGAGGTTG |
| | CCAAGAATTTAAATGAATCTCTCATCGATCTCCAAGAACTTGGAAAGTATGAGCAGTATATAAAATG |
| | GCCATGGTACATTTGGCTAGGTTTTATAGCTGGCTTGATTGCCATAGTAATGGTGACAATTATGCTT |
| | TGCTGTATGACCAGTTGCTGTAGTTGTCTCAAGGGCTGTTGTTCTTGTGGATCCTGCTGCAAATTTG |
| | ATGAAGACGACTCTGAGCCAGTGCTCAAAGGAGTCAAATTACATTACACATAAACGAACTTATGGAT |
| | TTGTTTATGAGAATCTTCACAATTGGAACTGTAACTTTGAAGCAAGGTGAAATCAAGGATGCTACTC |
| | CTTCAGATTTTGTTCGCGCTACTGCAACGATACCGATACAAGCCTCACTCCCTTTCGGATGGCTTAT |
| | TGTTGGCGTTGCACTTCTTGCTGTTTTTCAGAGCGCTTCCAAAATCATAACCCTCAAAAAGAGATGG |
| | CAACTAGCACTCTCCAAGGGTGTTCACTTTGTTTGCAACTTGCTGTTGTTGTTTGTAACAGTTTACT |
| | CACACCTTTTGCTCGTTGCTGCTGGCCTTGAAGCCCCTTTTCTCTATCTTTATGCTTTAGTCTACTT |
| | CTTGCAGAGTATAAACTTTGTAAGAATAATAATGAGGCTTTGGCTTTGCTGTAAATGCCGTTCCAAA |
| | AACCCATTACTTTATGATGCCAACTATTTTCTTTGCTGGCATACTAATTGTTACGACTATTGTATAC |
| | CTTACAATAGTGTAACTTCTTCAATTGTCATTACTTCAGGTGATGGCACAACAAGTCCTATTTCTGA |
| | ACATGACTACCAGATTGGTGGTTATACTGAAAAATGGGAATCTGGAGTAAAAGACTGTGTTGTATTA |
| | CACAGTTACTTCACTTCAGACTATTACCAGCTGTACTCAACTCAATTGAGTACAGACACTGGTGTTG |
| | AACATGTTACCTTCTTCATCTACAATAAAATTGTTGATGAGCCTGAAGAACATGTCCAAATTCACAC |
| | AATCGACGGTTCATCCGGAGTTGTTAATCCAGTAATGGAACCAATTTATGATGAACCGACGACGACT |
| | ACTAGCGTGCCTTTGTAAGCACAAGCTGATGAGTACGAACTTATGTACTCATTCGTTTCGGAAGAGA |
| | CAGGTACGTTAATAGTTAATAGCGTACTTCTTTTTCTTGCTTTCGTGGTATTCTTGCTAGTTACACT |
| | AGCCATCCTTACTGCGCTTCGATTGTGTGCGTACTGCTGCAATATTGTTAACGTGAGTCTTGTAAAA |
| | CCTTCTTTTTACGTTTACTCTCGTGTTAAAAATCTGAATTCTTCTAGAGTTCCTGATCTTCTGGTCT |
| | AAACGAACTAAATATTATATTAGTTTTTCTGTTTGGAACTTTAATTTTAGCCATGGCAGATTCCAAC |
| | GGTACTATTACCGTTGAAGAGCTTAAAAAGCTCCTTGAACAATGGAACCTAGTAATAGGTTTCCTAT |
| | TCCTTACATGGATTTGTCTTCTACAATTTGCCTATGCCAACAGGAATAGGTTTTTGTATATAATTAA |
| | GTTAATTTTCCTCTGGCTGTTATGGCCAGTAACTTTAGCTTGTTTTGTGCTTGCTGCTGTTTACAGA |
| | ATAAATTGGATCACCGGTGGAATTGCTATCGCAATGGCTTGTCTTGTAGGCTTGATGTGGCTCAGCT |
| | ACTTCATTGCTTCTTTCAGACTGTTTGCGCGTACGCGTTCCATGTGGTCATTCAATCCAGAAACTAA |
| | CATTCTTCTCAACGTGCCACTCCATGGCACTATTCTGACCAGACCGCTTCTAGAAAGTGAACTCGTA |
| | ATCGGAGCTGTGATCCTTCGTGGACATCTTCGTATTGCTGGACACCATCTAGGACGCTGTGACATCA |
| | AGGACCTGCCTAAAGAAATCACTGTTGCTACATCACGAACGCTTTCTTATTACAAATTGGGAGCTTC |
| | GCAGCGTGTAGCAGGTGACTCAGGTTTTGCTGCATACAGTCGCTACAGGATTGGCAACTATAAATTA |
| | AACACAGACCATTCCAGTAGCAGTGACAATATTGCTTTGCTTGTACAGTAAGTGACAACAGATGTTT |
| | CATCTCGTTGACTTTCAGGTTACTATAGCAGAGATATTACTAATTATTATGAGGACTTTTAAAGTTT |
| | CCATTTGGAATCTTGATTACATCATAAACCTCATAATTAAAAATTTATCTAAGTCACTAACTGAGAA |
| | TAAATATTCTCAATTAGATGAAGAGCAACCAATGGAGATTGATTAAACGAACATGAAAATTATTCTT |
| | TTCTTGGCACTGATAACACTCGCTACTTGTGAGCTTTATCACTACCAAGAGTGTGTTAGAGGTACAA |
| | CAGTACTTTTAAAAGAACCTTGCTCTTCTGGAACATNNNNNNNNNNNNNNNNNNNNNNNNNNNNNNN |
| | NNNNNNNNNNNNNNNNNNNNNNNNNNNNNNNNNNNNNNNNNNNNNNNNNNNNNNNNNNNNNNNNNNN |
| | NNNNNNNNNNNNNNNNNNNNNNNNNNNNNNNNNNNNNNNNNNNNNNNNNNNNNNNNNNNNNNNNNNN |
| | NNNNNNNNNNNNNNNNNNNNNNNNNNNNNNNNNNNNNNNNNNNNNNNNNNNNNNNNNNNNNNNNNNN |
| | NNNNNNNNNNNNNNNNNNNNNNNNNNNNNNNNNNNNNNNNNNNNNNNNNNNNNNNNNNNNNNNNNAT |
| | TCCTTGTTTTAATTATGCTTATTATCTTTTGGTTCTCACTTGAACTGCAAGATCATAATGAAACTTG |
| | TCACGCCTAAACGAACATGAAATTTCTTGTTTTCTTAGGAATCATCACAACTGTAGCTGCATTTCAC |
| | CAAGAATGTAGTTTACAGTCATGTACTTAACATCAACCATATGTAGTTGATGACCCGTGTCCTATTC |
| | ACTTCTATTCTAAATGGTATATTAGAGTAGGAGCTATAAAATCAGCACCTTTAATTGAATTGTGCGT |
| | GGATGAGGCTGGTTCTTAATCACCCATTCAGTGCATCGATATCGGTAATTATACAGTTTCCTGTTTA |
| | CCTTTTACAATTAATTGCCAGGAACCTAAATTGGGTAGTCTTGTAGTGCGTTGTTCGTTCTATGAAG |
| | ACTTTTTAGAGTATCATGACGTTCGTGTTGTTTTAGATTTCATCTAAACGAACAAACTAAATGTCTC |
| | TAAATGGACCCCAAAATCAGCGAAATGCACCCCGCATTACGTTTGGTGGACCCTCAGATTCAACTGG |
| | CAGTAACCAGAATGGAGAACGCAGTGGGGCGCGATCAAAACAACGTCGGCCCCAAGGTTTACCCAAT |
| | AATACTGCGTCTTGGTTCACCGCTCTCACTCAACATGGCAAGGAAGACCTTAAATTCCCTCGAGGAC |
| | AAGGCGTTCCAATTAACACCAATAGCAGTCCAGATGACCAAATTGGCTACTACCGAAGAGCTACCAG |
| | ACGAATTCGTGGTGGTGACGGTAAAATGAAAGATCTCAGTCCAAGATGGTATTTCTACTACCTAGGA |
| | ACTGGGCCAGAAGCTGGACTTCCCTATGGTGCTAACAAAGACGGCATCATATGGGTTGCAACTGAGG |
| | GAGCCTTGAATACACCAAAAGATCACATTGGCACCCGCAATCCTGCTAACAATGCTGCAATCGTGCT |
| | ACAACTTCCTCAAGGAACAACATTGCCAAAAGGCTTCTACGCAGAAGGGAGCAGAGGCGGCAGTCAA |
| | GCCTCTTCTCGTTCCTCATCACGTAGTCGCAACAGTTCAAGAAATTCAACTCCAGGCAGCAGTAAAC |
| | GAACTTCTCCTGCTAGAATGGCTGGCAATGGCGGTGATGCTGCTCTTGCTTTGCTGCTGCTTGACAG |
| | ATTGAACCAGCTTGAGAGCAAAATGTTTGGTAAAGGCCAACAACAACAAGGCCAAACTGTCACTAAG |
| | AAATCTGCTGCTGAGGCTTCTAAGAAGCCTCGGCAAAAACGTACTGCCACTAAAGCATACAATGTAA |
| | CACAAGCTTTCGGCAGACGTGGTCCAGAACAAACCCAAGGAAATTTTGGGGACCAGGAACTAATCAG |
| | ACAAGGAACTGATTACAAACATTGGCCGCAAATTGCACAATTTGCCCCCAGCGCTTCAGCGTTCTTC |
| | GGAATGTCGCGCATTGGCATGGAAGTCACACCTTCGGGAACGTGGTTGACCTACACAGGTGCCATCA |
| | AATTGGATGACAAAGATCCAAATTTCAAAGATCAAGTCATTTTGCTGAATAAGCATATTGACGCATA |
| | CAAAACATTCCCACCAACAGAGCCTAAAAAGGACAAAAAGAAGAAGGCTGATGAAACTCAAGCCTTA |
| | CCGCAGAGACAGAAGAAACAGCAAACTGTGACTCTTCTTCCTGCTGCAGATTTGGATGATTTCTCCA |
| | AACAATTGCAACAATCCATGAGCAGTGCTGACTCAACTCAGGCCTAAACTCATGCAGACCACACAAG |
| | GCAGATGGGCTATATAAACGTTTTCGCTTTTCCGTTTACGATATATAGTCTACTCTTGTGCAGAATG |
| | AATTCTCGTAACTACATAGCACAAGTAGATGTAGTTAACTTTAATCTCACATAGCAATCTTTAATCA |
| | GTGTGTAACATTAGGGAGGACTTGAAAGAGCCACCACATTTTCACCGAGGCCACGCGGAGTACGATC |
| | GAGTGTACAATGAACAATGCTAGGGAGAGCTGCCTATATGGAAGAGCCCTAATGTGTAAAATTAATT |
| | TTAGTAGTGCTATCC |
| 292 | GenBank Accession No. MW531680.1 (B.1.1.7 SARS-CoV-2 variant; Severe |
| | acute respiratory syndrome coronavirus 2 isolate SARS-CoV- |
| | 2/human/BGD/G039392/2021, complete genome) |
| | TGTAGATCTGTTCTCTAAACGAACTTTAAAATCTGTGTGGCTGTCACTCGGCTGCATGCTTAGTGCA |
| | CTCACGCAGTATAATTAATAACTAATTACTGTCGTTGACAGGACACGAGTAACTCGTCTATCTTCTG |
| | CAGGCTGCTTACGGTTTCGTCCGTGTTGCAGCCGATCATCAGCACATCTAGGTTTTGTCCGGGTGTG |
| | ACCGAAAGGTAAGATGGAGAGCCTTGTCCCTGGTTTCAACGAGAAAACACACGTCCAACTCAGTTTG |
| | CCTGTTTTACAGGTTCGCGACGTGCTCGTACGTGGCTTTGGAGACTCCGTGGAGGAGGTCTTATCAG |
| | AGGCACGTCAACATCTTAAAGATGGCACTTGTGGCTTAGTAGAAGTTGAAAAAGGCGTTTTGCCTCA |
| | ACTTGAACAGCCCTATGTGTTCATCAAACGTTCGGATGCTCGAACTGCACCTCATGGTCATGTTATG |
| | GTTGAGCTGGTAGCAGAACTCGAAGGCATTCAGTACGGTCGTAGTGGTGAGACACTTGGTGTCCTTG |
| | TCCCTCATGTGGGCGAAATACCAGTGGCTTACCGCAAGGTTCTTCTTCGTAAGAACGGTAATAAAGG |
| | AGCTGGTGGCCATAGTTACGGCGCCGATCTAAAGTCATTTGACTTAGGCGACGAGCTTGGCACTGAT |
| | CCTTATGAAGATTTTCAAGAAAACTGGAACACTAAACATAGCAGTGGTGTTACCCGTGAACTCATGC |
| | GTGAGCTTAACGGAGGGGCATACACTCGCTATGTCGATAACAACTTCTGTGGCCCTGATGGCTACCC |
| | TCTTGAGTGCATTAAAGACCTTCTAGCACGTGCTGGTAAAGCTTCATGCACTTTGTCTGAACAACTG |
| | GACTTTATTGACACTAAGAGGGGTGTATACTGCTGCCGTGAACATGAGCATGAAATTGCTTGGTACA |
| | CGGAACGTTCTGAAAAGAGCTATGAATTGCAGACACCTTTTGAAATTAAATTGGCAAAGAAATTTGA |
| | CACCTTCAATGGGGAATGTCCAAATTTTGTATTTCCCTTAAATTCCATAATCAAGACTATTCAACCA |
| | AGGGTTGAAAAGAAAAAGCTTGATGGCTTTATGGGTAGAATTCGATCTGTCTATCCAGTTGCGTCAC |
| | CAAATGAATGCAACCAAATGTGCCTTTCAACTCTCATGAAGTGTGATCATTGTGGTGAAACTTCATG |
| | GCAGACGGGCGATTTTGTTAAAGCCACTTGCGAATTTTGTGGCACTGAGAATTTGACTAAAGAAGGT |
| | GCCACTACTTGTGGTTACTTACCCCAAAATGCTGTTGTTAAAATTTATTGTCCAGCATGTCACAATT |
| | CAGAAGTAGGACCTGAGCATAGTCTTGCCGAATACCATAATGAATCTGGCTTGAAAACCATTCTTCG |
| | TAAGGGTGGTCGCACTATTGCCTTTGGAGGCTGTGTGTTCTCTTATGTTGGTTGCCATAACAAGTGT |
| | GCCTATTGGGTTCCACGTGCTAGCGCTAACATAGGTTGTAACCATACAGGTGTTGTTGGAGAAGGTT |
| | CCGAAGGTCTTAATGACAACCTTCTTGAAATACTCCAAAAAGAGAAAGTCAACATCAATATTGTTGG |
| | TGACTTTAAACTTAATGAAGAGATCGCCATTATTTTGGCATCTTTTTCTGCTTCCACAAGTGCTTTT |
| | GTGGAAACTGTGAAAGGTTTGGATTATAAAGCATTCAAACAAATTGTTGAATCCTGTGGTAATTTTA |
| | AAGTTACAAAAGGAAAAGCTAAAAAAGGTGCCTGGAATATTGGTGAACAGAAATCAATACTGAGTCC |
| | TCTTTATGCATTTGCATCAGAGGCTGCTCGTGTTGTACGATCAATTTTCTCCCGCACTCTTGAAACT |
| | GCTCAAAATTCTGTGCGTGTTTTACAGAAGGCCGCTATAACAATACTAGATGGAATTTCACAGTATT |
| | CACTGAGACTCATTGATGCTATGATGTTCACATCTGATTTGGCTACTAACAATCTAGTTGTAATGGC |
| | CTACATTACAGGTGGTGTTGTTCAGTTGACTTCGCAGTGGCTAACTAACATCTTTGGCACTGTTTAT |
| | GAAAAACTCAAACCCGTCCTTGATTGGCTTGAAGAGAAGTTTAAGGAAGGTGTAGAGTTTCTTAGAG |
| | ACGGTTGGGAAATTGTTAAATTTATCTCAACCTGTGCTTGTGAAATTGTCGGTGGACAAATTGTCAC |
| | CTGTGCAAAGGAAATTAAGGAGAGTGTTCAGACATTCTTTAAGCTTGTAAATAAATTTTTGGCTTTG |
| | TGTGCTGACTCTATCATTATTGGTGGAGCTAAACTTAAAGCCTTGAATTTAGGTGAAACATTTGTCA |
| | CGCACTCAAAGGGATTGTACAGAAAGTGTGTTAAATCCAGAGAAGAAACTGGCCTACTCATGCCTCT |
| | AAAAGCCCCAAAAGAAATTATCTTCTTAGAGGGAGAAACACTTCCCACAGAAGTGTTAACAGAGGAA |
| | GTTGTCTTGAAAACTGGTGATTTACAACCATTAGAACAACCTACTAGTGAAGCTGTTGAAGCTCCAT |
| | TGGTTGGTACACCAGTTTGTATTAACGGGCTTATGTTGCTCGAAATCAAAGACACAGAAAAGTACTG |
| | TGCCCTTGCACCTAATATGATGGTAACAAACAATACCTTCACACTCAAAGGCGGTGCACCAACAAAG |
| | GTTACTTTTGGTGATGACACTGTGATAGAAGTGCAAGGTTACAAGAGTGTGAATATCACTTTTGAAC |
| | TTGATGAAAGGATTGATAAAGTACTTAATGAGAAGTGCTCTGCCTATACAGTTGAACTCGGTACAGA |
| | AGTAAATGAGTTCGCCTGTGTTGTGGCAGATGCTGTCATAAAAACTTTGCAACCAGTATCTGAATTA |
| | CTTACACCACTGGGCATTGATTTAGATGAGTGGAGTATGGCTACATACTACTTATTTGATGAGTCTG |
| | GTGAGTTTAAATTGGCTTCACATATGTATTGTTCTTTTTACCCTCCAGATGAGGATGAAGAAGAAGG |
| | TGATTGTGAAGAAGAAGAGTTTGAGCCATCAACTCAATATGAGTATGGTACTGAAGATGATTAGCAA |
| | GGTAAACCTTTGGAATTTGGTGCCACTTCTGCTGCTCTTCAACCTGAAGAAGAGCAAGAAGAAGATT |
| | GGTTAGATGATGATAGTCAACAAACTGTTGGTCAACAAGACGGCAGTGAGGACAATCAGACAACTAT |
| | TATTCAAACAATTGTTGAGGTTCAACCTCAATTAGAGATGGAACTTACACCAGTTGTTCAGACTATT |
| | GAAGTGAATAGTTTTAGTGGTTATTTAAAACTTACTGACAATGTATACATTAAAAATGCAGACATTG |
| | TGGAAGAAGCTAAAAAGGTAAAACCAACAGTGGTTGTTAATGCAGCCAATGTTTACCTTAAACATGG |
| | AGGAGGTGTTGCAGGAGCCTTAAATAAGGCTACTAACAATGCCATGCAAGTTGAATCTGATGATTAC |
| | ATAGCTACTAATGGACCACTTAAAGTGGGTGGTAGTTGTGTTTTAAGCGGACACAATCTTGCTAAAC |
| | ACTGTCTTCATGTTGTCGGCCCAAATGTTAACAAAGGTGAAGACATTCAACTTCTTAAGAGTGCTTA |
| | TGAAAATTTTAATCAGCACGAAGTTCTACTTGCACCATTATTATCAGCTGGTATTTTTGGTGCTGAC |
| | CCTATACATTCTTTAAGAGTTTGTGTAGATACTGTTCGCACAAATGTCTACTTAGCTGTCTTTGATA |
| | AAAATCTCTATGACAAACTTGTTTCAAGCTTTTTGGAAATGAAGAGTGAAAAGCAAGTTGAACAAAA |
| | GATCGCTGAGATTCCTAAAGAGGAAGTTAAGCCATTTATAACTGAAAGTAAACCTTCAGTTGAACAG |
| | AGAAAACAAGATGATAAGAAAATCAAAGCTTGTGTTGAAGAAGTTACAACAACTCTGGAAGAAACTA |
| | AGTTCCTCACAGAAAACTTGTTACTTTATATTGACATTAATGGCAATCTTCATCCAGATTCTGCCAC |
| | TCTTGTTAGTGACATTGACATCACTTTCTTAAAGAAAGATGCTCCATATATAGTGGGTGATGTTGTT |
| | CAAGAGGGTGTTTTAACTGCTGTGGTTATACCTACTAAAAAGGCTGGTGGCACTACTGAAATGCTAG |
| | CGAAAGCTTTGAGAAAAGTGCCAACAGACAATTATATAACCACTTACCCGGGTCAGGGTTTAAATGG |
| | TTACACTGTAGAGGAGGCAAAGACAGTGCTTAAAAAGTGTAAAAGTGCCTTTTACATTCTACCATCT |
| | ATTATCTCTAATGAGAAGCAAGAAATTCTTGGAACTGTTTCTTGGAATTTGCGAGAAATGCTTGCAC |
| | ATGCAGAAGAAACACGCAAATTAATGCCTGTCTGTGTGGAAACTAAAGCCATAGTTTCAACTATACA |
| | GCGTAAATATAAGGGTATTAAAATACAAGAGGGTGTGGTTGATTATGGTGCTAGATTTTACTTTTAC |
| | ACCAGTAAAACAACTGTAGCGTCACTTATCAACACACTTAACGATCTAAATGAAACTCTTGTTACAA |
| | TGCCACTTGGCTATGTAACACATGGCTTAAATTTGGAAGAAGCTGCTCGGTATATGAGATCTCTCAA |
| | AGTGCCAGCTACAGTTTCTGTTTCTTCACCTGATGCTGTTACAGCGTATAATGGTTATCTTACTTCT |
| | TCTTCTAAAACACCTGAAGAACATTTTATTGAAACCATCTCACTTGCTGGTTCCTATAAAGATTGGT |
| | CCTATTCTGGACAATCTACACAACTAGGTATAGAATTTCTTAAGAGAGGTGATAAAAGTGTATATTA |
| | CACTAGTAATCCTACCACATTCCACCTAGATGGTGAAGTTATCACCTTTGACAATCTTAAGACACTT |
| | CTTTCTTTGAGAGAAGTGAGGACTATTAAGGTGTTTACAACAGTAGACAACATTAACCTCCACACGC |
| | AAGTTGTGGACATGTCAATGACATATGGACAACAGTTTGGTCCAACTTATTTGGATGGAGCTGATGT |
| | TACTAAAATAAAACCTCATAATTCACATGAAGGTAAAACATTTTATGTTTTACCTAATGATGACACT |
| | CTACGTGTTGAGGCTTTTGAGTACTACCACACAACTGATCCTAGTTTTCTGGGTAGGTACATGTCAG |
| | CATTAAATCACACTAAAAAGTGGAAATACCCACAAGTTAATGGTTTAACTTCTATAAAATGGGCAGA |
| | TAACAACTGTTATCTTGCCACTGCATTGTTAACACTCCAACAAATAGAGTTGAAGTTTAATCCACCT |
| | GCTCTACAAGATGCTTATTACAGAGCAAGGGCTGGTGAAGCTGATAACTTTTGTGCACTTATCTTAG |
| | CCTACTGTAATAAGACAGTAGGTGAGTTAGGTGATGTTAGAGAAACAATGAGTTACTTGTTTCAACA |
| | TGCCAATTTAGATTCTTGCAAAAGAGTCTTGAACGTGGTGTGTAAAACTTGTGGACAACAGCAGACA |
| | ACCCTTAAGGGTGTAGAAGCTGTTATGTACATGGGCACACTTTCTTATGAACAATTTAAGAAAGGTG |
| | TTCAGATACCTTGTACGTGTGGTAAACAAGCTACAAAATATCTAGTACAACAGGAGTCACCTTTTGT |
| | TATGATGTCAGCACCACCTGCTCAGTATGAACTTAAGCATGGTACATTTACTTGTGCTAGTGAGTAC |
| | ACTGGTAATTACCAGTGTGGTCACTATAAACATATAACTTCTAAAGAAACTTTGTATTGCATAGACG |
| | GTGCTTTACTTACAAAGTCCTCAGAATACAAAGGTCCTATTACGGATGTTTTCTACAAAGAAAACAG |
| | TTACACAACAACCATAAAACCAGTTACTTATAAATTGGATGGTGTTGTTTGTACAGAAATTGACCCT |
| | AAGTTGGACAATTATTATAAGAAAGACAATTCTTATTTTACAGAGCAACCAATTGATCTTGTACCAA |
| | ACCAACCATATCCAAACGCAAGCTTCGATAATTTTAAGTTTGTATGTGATAATATCAAATTTGCTGA |
| | TGATTTAAACCAGTTAACTGGTTATAAGAAACCTGCTTCAAGAGAGCTTAAAGTTACATTTTTCCCT |
| | GACTTAAATGGTGATGTGGTGGCTATTGATTATAAACACTACACACCCTCTTTTAAGAAAGGAGCTA |
| | AATTGTTACATAAACCTATTGTTTGGCATGTTAACAATGCAACTAATAAAGCCACGTATAAACCAAA |
| | TACCTGGTGTATACGTTGTCTTTGGAGCACAAAACCAGTTGAAACATCAAATTCGTTTGATGTACTG |
| | AAGTCAGAGGACGCGCAGGGAATGGATAATCTTGCCTGCGAAGATCTAAAACCAGTCTCTGAAGAAG |
| | TAGTGGAAAATCCTACCATACAGAAAGACGTTCTTGAGTGTAATGTGAAAACTACCGAAGTTGTAGG |
| | AGACATTATACTTAAACCAGCAAATAATAGTTTAAAAATTACAGAAGAGGTTGGCCACACAGATCTA |
| | ATGGCTGCTTATGTAGACAATTCTAGTCTTACTATTAAGAAACCTAATGAATTATCTAGAGTATTAG |
| | GTTTGAAAACCCTTGCTACTCATGGTTTAGCTGCTGTTAATAGTGTCCCTTGGGATACTATAGCTAA |
| | TTATGCTAAGCCTTTTCTTAACAAAGTTGTTAGTACAACTACTAACATAGTTACACGGTGTTTAAAC |
| | CGTGTTTGTACTAATTATATGCCTTATTTCTTTACTTTATTGCTACAATTGTGTACTTTTACTAGAA |
| | GTACAAATTCTAGAATTAAAGCATCTATGCCGACTACTATAGCAAAGAATACTGTTAAGAGTGTCGG |
| | TAAATTTTGTCTAGAGGCTTCATTTAATTATTTGAAGTCACCTAATTTTTCTAAACTGATAAATATT |
| | ACAATTTGGTTTTTACTATTAAGTGTTTGCCTAGGTTCTTTAATCTACTCAACCGCTGCTTTAGGTG |
| | TTTTAATGTCTAATTTAGGCATGCCTTCTTACTGTACTGGTTACAGAGAAGGCTATTTGAACTCTAC |
| | TAATGTCACTATTGCAACCTACTGTACTGGTTCTATACCTTGTAGTGTTTGTCTTAGTGGTTTAGAT |
| | TCTTTAGACACCTATCCTTCTTTAGAAACTATACAAATTACCATTTCATCTTTTAAATGGGATTTAA |
| | CTGCTTTTGGCTTAGTTGCAGAGTGGTTTTTGGCATATATTCTTTTCACTAGGTTTTTCTATGTACT |
| | TGGATTGGCTGCAATCATGCAATTGTTTTTCAGCTATTTTGCAGTACATTTTATTAGTAATTCTTGG |
| | CTTATGTGGTTAATAATTAATCTTGTACAAATGGCCCCGATTTCAGCTATGGTTAGAATGTACATCT |
| | TCTTTGCATCATTTTATTATGTATGGAAAAGTTATGTGCATGTTGTAGACGGTTGTAATTCATCAAC |
| | TTGTATGATGTGTTACAAACGTAATAGAGCAACAAGAGTCGAATGTACAACTATTGTTAATGGTGTT |
| | AGAAGGTCCTTTTATGTCTATGCTAATGGAGGTAAAGGCTTTTGCAAACTACACAATTGGAATTGTG |
| | TTAATTGTGATACATTCTGTGCTGGTAGTACATTTATTAGTGATGAAGTTGCGAGAGACTTGTCACT |
| | ACAGTTTAAAAGACCAATAAATCCTACTGACCAGTCTTCTTACATCGTTGATAGTGTTACAGTGAAG |
| | AATGGTTCCATCCATCTTTACTTTGATAAAGCTGGTCAAAAGACTTATGAAAGACATTCTCTCTCTC |
| | ATTTTGTTAACTTAGACAACCTGAGAGCTAATAACACTAAAGGTTCATTGCCTATTAATGTTATAGT |
| | TTTTGATGGTAAATCAAAATGTGAAGAATCATCTGCAAAATCAGCGTCTGTTTACTACAGTCAGCTT |
| | ATGTGTCAACCTATACTGTTACTAGATCAGGCATTAGTGTCTGATGTTGGTGATAGTGCGGAAGTTG |
| | CAGTTAAAATGTTTGATGCTTACGTTAATACGTTTTCATCAACTTTTAACGTACCAATGGAAAAACT |
| | CAAAACACTAGTTGCAACTGCAGAAGCTGAACTTGCAAAGAATGTGTCCTTAGACAATGTCTTATCT |
| | ACTTTTATTTCAGCAGCTCGGCAAGGGTTTGTTGATTCAGATGTAGAAACTAAAGATGTTGTTGAAT |
| | GTCTTAAATTGTCACATCAATCTGACATAGAAGTTACTGGCGATAGTTGTAATAACTATATGCTCAC |
| | CTATAACAAAGTTGAAAACATGACACCCCGTGACCTTGGTGCTTGTATTGACTGTAGTGCGCGTCAT |
| | ATTAATGCGCAGGTAGCAAAAAGTCACAACATTGCTTTGATATGGAACGTTAAAGATTTCATGTCAT |
| | TGTCTGAACAACTACGAAAACAAATACGTAGTGCTGCTAAAAAGAATAACTTACCTTTTAAGTTGAC |
| | ATGTGCAACTACTAGACAAGTTGTTAATGTTGTAACAACAAAGATAGCACTTAAGGGTGGTAAAATT |
| | GTTAATAATTGGTTGAAGCAGTTAATTAAAGTTACACTTGTGTTCCTTTTTGTTGCTGCTATTTTCT |
| | ATTTAATAACACCTGTTCATGTCATGTCTAAACATACTGACTTTTCAAGTGAAATCATAGGATACAA |
| | GGCTATTGATGGTGGTGTCACTCGTGACATAGCATCTACAGATACTTGTTTTGCTAACAAACATGCT |
| | GATTTTGACACATGGTTTAGCCAGCGTGGTGGTAGTTATACTAATGACAAAGCTTGCCCATTGATTG |
| | CTGCAGTCATAACAAGAGAAGTGGGTTTTGTCGTGCCTGGTTTGCCTGGCACGATATTACGCACAAC |
| | TAATGGTGACTTTTTGCATTTCTTACCTAGAGTTTTTAGTGCAGTTGGTAACATCTGTTACACACCA |
| | TCAAAACTTATAGAGTACACTGACTTTGCAACATCAGCTTGTGTTTTGGCTGCTGAATGTACAATTT |
| | TTAAAGATGCTTCTGGTAAGCCAGTACCATATTGTTATGATACCAATGTACTAGAAGGTTCTGTTGC |
| | TTATGAAAGTTTACGCCCTGACACACGTTATGTGCTCATGGATGGCTCTATTATTCAATTTCCTAAC |
| | ACCTACCTTGAAGGTTCTGTTAGAGTGGTAACAACTTTTGATTCTGAGTACTGTAGGCACGGCACTT |
| | GTGAAAGATCAGAAGCTGGTGTTTGTGTATCTACTAGTGGTAGATGGGTACTTAACAATGATTATTA |
| | CAGATCTTTACCAGGAGTTTTCTGTGGTGTAGATGCTGTAAATTTACTTACTAATATGTTTACACCA |
| | CTAATTCAACCTATTGGTGCTTTGGACATATCAGCATCTATAGTAGCTGGTGGTATTGTAGCTATCG |
| | TAGTAACATGCCTTGCCTACTATTTTATGAGGTTTAGAAGAGCTTTTGGTGAATACAGTCATGTAGT |
| | TGCCTTTAATACTTTACTATTCCTTATGTCATTCACTGTACTCTGTTTAACACCAGTTTACTCATTC |
| | TTACCTGGTGTTTATTCTGTTATTTACTTGTACTTGACATTTTATCTTACTAATGATGTTTCTTTTT |
| | TAGCACATATTCAGTGGATGGTTATGTTCACACCTTTAGTACCTTTCTGGATAACAATTGCTTATAT |
| | CATTTGTATTTCCACAAAGCATTTCTATTGGTTCTTTAGTAATTACCTAAAGAGACGTGTAGTCTTT |
| | AATGGTGTTTCCTTTAGTACTTTTGAAGAAGCTGCGCTGTGCACCTTTTTGTTAAATAAAGAAATGT |
| | ATCTAAAGTTGCGTAGTGATGTGCTATTACCTCTTACGCAATATAATAGATACTTAGCTCTTTATAA |
| | TAAGTACAAGTATTTTAGTGGAGCAATGGATACAACTAGCTACAGAGAAGCTGCTTGTTGTCATCTC |
| | GCAAAGGCTCTCAATGACTTCAGTAACTCAGGTTCTGATGTTCTTTACCAACCACCACAAACCTCTA |
| | TCACCTCAGCTGTTTTGCAGAGTGGTTTTAGAAAAATGGCATTCCCATCTGGTAAAGTTGAGGGTTG |
| | TATGGTACAAGTAACTTGTGGTACAACTACACTTAACGGTCTTTGGCTTGATGACGTAGTTTACTGT |
| | CCAAGACATGTGATCTGCACCTCTGAAGACATGCTTAACCCTAATTATGAAGATTTACTCATTCGTA |
| | AGTCTAATCATAATTTCTTGGTACAGGCTGGTAATGTTCAACTCAGGGTTATTGGACATTCTATGCA |
| | AAATTGTGTACTTAAGCTTAAGGTTGATACAGCCAATCCTAAGACACCTAAGTATAAGTTTGTTCGC |
| | ATTCAACCAGGACAGACTTTTTCAGTGTTAGCTTGTTACAATGGTTCACCATCTGGTGTTTACCAAT |
| | GTGCTATGAGGCCCAATTTCACTATTAAGGGTTCATTCCTTAATGGTTCATGTGGTAGTGTTGGTTT |
| | TAACATAGATTATGACTGTGTCTCTTTTTGTTACATGCACCATATGGAATTACCAACTGGAGTTCAT |
| | GCTGGCACAGACTTAGAAGGTAACTTTTATGGACCTTTTGTTGACAGGCAAACAGCACAAGCAGCTG |
| | GTACGGACACAACTATTACAGTTAATGTTTTAGCTTGGTTGTACGCTGCTGTTATAAATGGAGACAG |
| | GTGGTTTCTCAATCGATTTACCACAACTCTTAATGACTTTAACCTTGTGGCTATGAAGTACAATTAT |
| | GAACCTCTAACACAAGACCATGTTGACATACTAGGACCTCTTTCTGCTCAAACTGGAATTGCCGTTT |
| | TAGATATGTGTGCTTCATTAAAAGAATTACTGCAAAATGGTATGAATGGACGTACCATATTGGGTAG |
| | TGCTTTATTAGAAGATGAATTTACACCTTTTGATGTTGTTAGACAATGCTCAGGTGTTACTTTCCAA |
| | AGTGCAGTGAAAAGAACAATCAAGGGTACACACCACTGGTTGTTACTCACAATTTTGACTTCACTTT |
| | TAGTTTTAGTCCAGAGTACTCAATGGTCTTTGTTCTTTTTTTTGTATGAAAATGCCTTTTTACCTTT |
| | TGCTATGGGTATTATTGCTATGTCTGCTTTTGCAATGATGTTTGTCAAACATAAGCATGCATTTCTC |
| | TGTTTGTTTTTGTTACCTTCTCTTGCCACTGTAGCTTATTTTAATATGGTCTATATGCCTGCTAGTT |
| | GGGTGATGCGTATTATGACATGGTTGGATATGGTTGATACTAGTTTGAAGCTAAAAGACTGTGTTAT |
| | GTATGCATCAGCTGTAGTGTTACTAATCCTTATGACAGCAAGAACTGTGTATGATGATGGTGCTAGG |
| | AGAGTGTGGACACTTATGAATGTCTTGACACTCGTTTATAAAGTTTATTATGGTAATGCTTTAGATC |
| | AAGCCATTTCCATGTGGGCTCTTATAATCTCTGTTACTTCTAACTACTCAGGTGTAGTTACAACTGT |
| | CATGTTTTTGGCCAGAGGTATTGTTTTTATGTGTGTTGAGTATTGCCCTATTTTCTTCATAACTGGT |
| | AATACACTTCAGTGTATAATGCTAGTTTATTGTTTCTTAGGCTATTTTTGTACTTGTTACTTTGGCC |
| | TCTTTTGTTTACTCAACCGCTACTTTAGACTGACTCTTGGTGTTTATGATTACTTAGTTTCTACACA |
| | GGAGTTTAGATATATGAATTCACAGGGACTACTCCCACCCAAGAATAGCATAGATGCCTTCAAACTC |
| | AACATTAAATTGTTGGGTGTTGGTGGCAAACCTTGTATCAAAGTAGCCACTGTACAGTCTAAAATGT |
| | CAGATGTAAAGTGCACATCAGTAGTCTTACTCTCAGTTTTGCAACAACTCAGAGTAGAATCATCATC |
| | TAAATTGTGGGCTCAATGTGTCCAGTTACACAATGACATTCTCTTAGCTAAAGATACTACTGAAGCC |
| | TTTGAAAAAATGGTTTCACTACTTTCTGTTTTGCTTTCCATGCAGGGTGCTGTAGACATAAACAAGC |
| | TTTGTGAAGAAATGCTGGACAACAGGGCAACCTTACAAGCTATAGCCTCAGAGTTTAGTTCCCTTCC |
| | ATCATATGCAGCTTTTGCTACTGCTCAAGAAGCTTATGAGCAGGCTGTTGCTAATGGTGATTCTGAA |
| | GTTGTTCTTAAAAAGTTGAAGAAGTCTTTGAATGTGGCTAAATCTGAATTTGACCGTGATGCAGCCA |
| | TGCAACGTAAGTTGGAAAAGATGGCTGATCAAGCTATGACCCAAATGTATAAACAGGCTAGATCTGA |
| | GGACAAGAGGGCAAAAGTTACTAGTGCTATGCAGACAATGCTTTTCACTATGCTTAGAAAGTTGGAT |
| | AATGATGCACTCAACAACATTATCAACAATGCAAGAGATGGTTGTGTTCCCTTGAACATAATACCTC |
| | TTACAACAGCAGCCAAACTAATGGTTGTCATACCAGACTATAACACATATAAAAATACGTGTGATGG |
| | TACAACATTTACTTATGCATCAGCATTGTGGGAAATCCAACAGGTTGTAGATGCAGATAGTAAAATT |
| | GTTCAACTTAGTGAAATTAGTATGGACAATTCACCTAATTTAGCATGGCCTCTTATTGTAACAGCTT |
| | TAAGGGCCAATTCTGCTGTCAAATTACAGAATAATGAGCTTAGTCCTGTTGCACTACGACAGATGTC |
| | TTGTGCTGCCGGTACTACACAAACTGCTTGCACTGATGACAATGCGTTAGCTTACTACAACACAACA |
| | AAGGGAGGTAGGTTTGTACTTGCACTGTTATCCGATTTACAGGATTTGAAATGGGCTAGATTCCCTA |
| | AGAGTGATGGAACTGGTACTATCTATACAGAACTGGAACCACCTTGTAGGTTTGTTACAGACACACC |
| | TAAAGGTCCTAAAGTGAAGTATTTATACTTTATTAAAGGATTAAACAACCTAAATAGAGGTATGGTA |
| | CTTGGTAGTTTAGCTGCCACAGTACGTCTACAAGCTGGTAATGCAACAGAAGTGCCTGCCAATTCAA |
| | CTGTATTATCTTTCTGTGCTTTTGCTGTAGATGCTGCTAAAGCTTACAAAGATTATCTAGCTAGTGG |
| | GGGACAACCAATCACTAATTGTGTTAAGATGTTGTGTACACACACTGGTACTGGTCAGGCAATAACA |
| | GTTACACCGGAAGCCAATATGGATCAAGAATCCTTTGGTGGTGCATCGTGTTGTCTGTACTGCCGTT |
| | GCCACATAGATCATCCAAATCCTAAAGGATTTTGTGACTTAAAAGGTAAGTATGTACAAATACCTAC |
| | AACTTGTGCTAATGACCCTGTGGGTTTTACACTTAAAAACACAGTCTGTACCGTCTGCGGTATGTGG |
| | AAAGGTTATGGCTGTAGTTGTGATCAACTCCGCGAACCCATGCTTCAGTCAGCTGATGCACAATCGT |
| | TTTTAAACGGGTTTGCGGTGTAAGTGCAGCCCGTCTTACACCGTGCGGCACAGGCACTAGTACTGAT |
| | GTCGTATACAGGGCTTTTGACATCTACAATGATAAAGTAGCTGGTTTTGCTAAATTCCTAAAAACTA |
| | ATTGTTGTCGCTTCCAAGAAAAGGACGAAGATGACAATTTAATTGATTCTTACTTTGTAGTTAAGAG |
| | ACACACTTTCTCTAACTACCAACATGAAGAAACAATTTATAATTTACTTAAGGATTGTCCAGCTGTT |
| | GCTAAACATGACTTCTTTAAGTTTAGAATAGACGGTGACATGGTACCACATATATCACGTCAACGTC |
| | TTACTAAATACACAATGGCAGACCTCGTCTATGCTTTAAGGCATTTTGATGAAGGTAATTGTGACAC |
| | ATTAAAAGAAATACTTGTCACATACAATTGTTGTGATGATGATTATTTCAATAAAAAGGACTGGTAT |
| | GATTTTGTAGAAAACCCAGATATATTACGCGTATACGCCAACTTAGGTGAACGTGTACGCCAAGCTT |
| | TGTTAAAAACAGTACAATTCTGTGATGCCATGCGAAATGCTGGTATTGTTGGTGTACTGACATTAGA |
| | TAATCAAGATCTCAATGGTAACTGGTATGATTTCGGTGATTTCATACAAACCACGCCAGGTAGTGGA |
| | GTTCCTGTTGTAGATTCTTATTATTCATTGTTAATGCCTATATTAACCTTGACCAGGGCTTTAACTG |
| | CAGAGTCACATGTTGACACTGACTTAACAAAGCCTTACATTAAGTGGGATTTGTTAAAATATGACTT |
| | CACGGAAGAGAGGTTAAAACTCTTTGACCGTTATTTTAAATATTGGGATCAGACATACCACCCAAAT |
| | TGTGTTAACTGTTTGGATGACAGATGCATTCTGCATTGTGCAAACTTTAATGTTTTATTCTCTACAG |
| | TGTTCCCACTTACAAGTTTTGGACCACTAGTGAGAAAAATATTTGTTGATGGTGTTCCATTTGTAGT |
| | TTCAACTGGATACCACTTCAGAGAGCTAGGTGTTGTACATAATCAGGATGTAAACTTACATAGCTCT |
| | AGACTTAGTTTTAAGGAATTACTTGTGTATGCTGCTGACCCTGCTATGCACGCTGCTTCTGGTAATC |
| | TATTACTAGATAAACGCACTACGTGCTTTTCAGTAGCTGCACTTACTAACAATGTTGCTTTTCAAAC |
| | TGTCAAACCTGGTAATTTTAACAAAGACTTCTATGACTTTGCTGTGTCTAAGGGTTTCTTTAAGGAA |
| | GGAAGTTCTGTTGAATTAAAACACTTCTTCTTTGCTCAGGATGGTAATGCTGCTATCAGCGATTATG |
| | ACTACTATCGTTATAATCTACCAACAATGTGTGATATCAGACAACTACTATTTGTAGTTGAAGTTGT |
| | TGATAAGTACTTTGATTGTTACGATGGTGGCTGTATTAATGCTAACCAAGTCATCGTCAACAACCTA |
| | GACAAATCAGCTGGTTTTCCATTTAATAAATGGGGTAAGGCTAGACTTTATTATGATTCAATGAGTT |
| | ATGAGGATCAAGATGCACTTTTCGCATATACAAAACGTAATGTCATCCCTACTATAACTCAAATGAA |
| | TCTTAAGTATGCCATTAGTGCAAAGAATAGAGCTCGCACCGTAGCTGGTGTCTCTATCTGTAGTACT |
| | ATGACCAATAGACAGTTTCATCAAAAATTATTGAAATCAATAGCCGCCACTAGAGGAGCTACTGTAG |
| | TAATTGGAACAAGCAAATTCTATGGTGGTTGGCACAACATGTTAAAAACTGTTTATAGTGATGTAGA |
| | AAACCCTCATCTTATGGGTTGGGATTATCCTAAATGTGATAGAGCCATGCCTAACATGCTTAGAATT |
| | ATGGCCTCACTTGTTCTTGCTCGCAAACATACAACGTGTTGTAGCTTGTCACACCGTTTCTATAGAT |
| | TAGCTAATGAGTGTGCTCAAGTATTGAGTGAAATGGTCATGTGTGGCGGTTCACTATATGTTAAACC |
| | AGGTGGAACCTCATCAGGAGATGCCACAACTGCTTATGCTAATAGTGTTTTTAACATTTGTCAAGCT |
| | GTCACGGCCAATGTTAATGCACTTTTATCTACTGATGGTAACAAAATTGCCGATAAGTATGTCCGCA |
| | ATTTACAACACAGACTTTATGAGTGTCTCTATAGAAATAGAGATGTTGACACAGACTTTGTGAATGA |
| | GTTTTACGCATATTTGCGTAAACATTTCTCAATGATGATACTCTCTGACGATGCTGTTGTGTGTTTC |
| | AATAGCACTTATGCATCTCAAGGTCTAGTGGCTAGCATAAAGAACTTTAAGTCAGTTCTTTATTATC |
| | AAAACAATGTTTTTATGTCTGAAGCAAAATGTTGGACTGAGACTGACCTTACTAAAGGACCTCATGA |
| | ATTTTGCTCTCAACATACAATGCTAGTTAAACAGGGTGATGATTATGTGTACCTTCCTTACCCAGAT |
| | CCATCAAGAATCCTAGGGGCCGGCTGTTTTGTAGATGATATCGTAAAAACAGATGGTACACTTATGA |
| | TTGAACGGTTCGTGTCTTTAGCTATAGATGCTTACCCACTTACTAAACATCCTAATCAGGAGTATGC |
| | TGATGTCTTTCATTTGTACTTACAATACATAAGAAAGCTACATGATGAGTTAACAGGACACATGTTA |
| | GACATGTATTCTGTTATGCTTACTAATGATAACACCTCAAGGTATTGGGAACCTGAGTTTTATGAGG |
| | CTATGTACACACCGCATACAGTCTTACAGGCTGTTGGGGCTTGTGTTCTTTGCAATTCACAGACTTC |
| | ATTAAGATGTGGTGCTTGCATACGTAGACCATTCTTATGTTGTAAATGCTGTTACGACCATGTCATA |
| | TCAACATCACATAAATTAGTCTTGTCTGTTAATCCGTATGTTTGCAATGCTCCAGGTTGTGATGTCA |
| | CAGATGTGACTCAACTTTACTTAGGAGGTATGAGCTATTATTGTAAATCACATAAACCATCCATTAG |
| | TTTTCCATTGTGTGCTAATGGACAAGTTTTTGGTTTATATAAAAATACATGTGTTGGTAGCGATAAT |
| | GTTACTGACTTTAATGCAATTGCAACATGTGACTGGACAAATGCTGGTGATTACATTTTAGCTAACA |
| | CCTGTACTGAAAGACTCAAGCTTTTTGCAGCAGAAACGCTCAAAGCTACTGAGGAGACATTTAAACT |
| | GTCTTATGGTATTGCTACTGTACGTGAAGTGCTGTCTGACAGAGAATTACATCTTTCATGGGAAGTT |
| | GGTAAACCTAGACCACCACTTAACCGAAATTATGTCTTTACTGGTTATCGTGTAACTAAAAACAGTA |
| | AAGTACAAATAGGAGAGTACACCTTTGAAAAAGGTGACTATGGTGATGCTGTTGTTTACCGAGGTAC |
| | AACAACTTACAAATTAAATGTTGGTGATTATTTTGTGCTGACATCACATACAGTAATGCCATTAAGT |
| | GCACCTACACTAGTGCCACAAGAGCACTATGTTAGAATTACTGGCTTATACCCAACACTCAATATCT |
| | CAGATGAGTTTTCTAGCAATGTTGCAAATTATCAAAAGGTTGGTATGCAAAAGTATTCTACACTCCA |
| | GGGACCACCTGGTACTGGTAAGAGTCATTTTGCTATTGGCCTAGCTCTCTACTACCCTTCTGCTCGC |
| | ATAGTGTATACAGCTTGCTCTCATGCCGCTGTTGATGCACTATGTGAGAAGGCATTAAAATATTTGC |
| | CTATAGATAAATGTAGTAGAATTATACCTGCACGTGCTCGTGTAGAGTGTTTTGATAAATTCAAAGT |
| | GAATTCAACATTAGAACAGTATGTCTTTTGTACTGTAAATGCATTGCCTGAGACGACAGCAGATATA |
| | GTTGTCTTTGATGAAATTTCAATGGCCACAAATTATGATTTGAGTGTTGTCAATGCCAGATTACGTG |
| | CTAAGCACTATGTGTACATTGGCGACCCTGCTCAATTACCTGCACCACGCACATTGCTAACTAAGGG |
| | CACACTAGAACCAGAATATTTCAATTCAGTGTGTAGACTTATGAAAACTATAGGTCCAGACATGTTC |
| | CTCGGAACTTGTCGGCGTTGTCCTGCTGAAATTGTTGACACTGTGAGTGCTTTGGTTTATGATAATA |
| | GGCTTAAAGCACATAAAGACAAATCAGCTCAATGCTTTAAAATGTTTTATAAGGGTGTTATCACGCA |
| | TGATGTTTCATCTGCAATTAACAGGCCACAAATAGGCGTGGTAAGAGAATTCCTTACACGTAACCCT |
| | GCTTGGAGAAAAGCTGTCTTTATTTCACCTTATAATTCACAGAATGCTGTAGCCTCAAAGATTTTGG |
| | GACTACCAACTCAAACTGTTGATTCATCACAGGGCTCAGAATATGACTATGTCATATTCACTCAAAC |
| | CACTGAAACAGCTCACTCTTGTAATGTAAACAGATTTAATGTTGCTATTACCAGAGCAAAAGTAGGC |
| | ATACTTTGCATAATGTCTGATAGAGACCTTTATGACAAGTTGCAATTTACAAGTCTTGAAATTCCAC |
| | GTAGGAATGTGGCAACTTTACAAGCTGAAAATGTAACAGGACTCTTTAAAGATTGTAGTAAGGTAAT |
| | CACTGGGTTACATCCTACACAGGCACCTACACACCTCAGTGTTGACACTAAATTCAAAACTGAAGGT |
| | TTATGTGTTGACATACCTGGCATACCTAAGGACATGACCTATAGAAGACTCATCTCTATGATGGGTT |
| | TTAAAATGAATTATCAAGTTAATGGTTACCCTAACATGTTTATCACCCGCGAAGAAGCTATAAGACA |
| | TGTACGTGCATGGATTGGCTTCGATGTCGAGGGGTGTCATGCTACTAGAGAAGCTGTTGGTACCAAT |
| | TTACCTTTACAGCTAGGTTTTTCTACAGGTGTTAACCTAGTTGCTGTACCTACAGGTTATGTTGATA |
| | CACCTAATAATACAGATTTTTCCAGAGTTAGTGCTAAACCACCGCCTGGAGATCAATTTAAACACCT |
| | CATACCACTTATGTACAAAGGACTTCCTTGGAATGTAGTGCGTATAAAGATTGTACAAATGTTAAGT |
| | GACACACTTAAAAATCTCTCTGACAGAGTCGTATTTGTCTTATGGGCACATGGCTTTGAGTTGACAT |
| | CTATGAAGTATTTTGTGAAAATAGGACCTGAGCGCACCTGTTGTCTATGTGATAGACGTGCCACATG |
| | CTTTTCCACTGCTTCAGACACTTATGCCTGTTGGCATCATTCTATTGGATTTGATTACGTCTATAAT |
| | CCGTTTATGATTGATGTTCAACAATGGGGTTTTACAGGTAACCTACAAAGCAACCATGATCTGTATT |
| | GTCAAGTCCATGGTAATGCACATGTAGCTAGTTGTGATGCAATCATGACTAGGTGTCTAGCTGTCCA |
| | CGAGTGCTTTGTTAAGCGTGTTGACTGGACTATTGAATATCCTATAATTGGTGATGAACTGAAGATT |
| | AATGCGGCTTGTAGAAAGGTTCAACACATGGTTGTTAAAGCTGCATTATTAGCAGACAAATTCCCAG |
| | TTCTTCACGACATTGGTAACCCTAAAGCTATTAAGTGTGTACCTCAAGCTGATGTAGAATGGAAGTT |
| | CTATGATGCACAGCCTTGTAGTGACAAAGCTTATAAAATAGAAGAATTATTCTATTCTTATGCCACA |
| | CATTCTGACAAATTCACAGATGGTGTATGCCTATTTTGGAATTGCAATGTCGATAGATATCCTGCTA |
| | ATTCCATTGTTTGTAGATTTGACACTAGAGTGCTATCTAACCTTAACTTGCCTGGTTGTGATGGTGG |
| | CAGTTTGTATGTAAATAAACATGCATTCCACACACCAGCTTTTGATAAAAGTGCTTTTGTTAATTTA |
| | AAACAATTACCATTTTTCTATTACTCTGACAGTCCATGTGAGTCTCATGGAAAACAAGTAGTGTCAG |
| | ATATAGATTATGTACCACTAAAGTCTGCTACGTGTATAACACGTTGCAATTTAGGTGGTGCTGTCTG |
| | TAGACATCATGCTAATGAGTACAGATTGTATCTCGATGCTTATAACATGATGATCTCAGCTGGCTTT |
| | AGCTTGTGGGTTTACAAACAATTTGATACTTATAACCTCTGGAACACTTTTACAAGACTTCAGAGTT |
| | TAGAAAATGTGGCTTTTAATGTTGTAAATAAGGGACACTTTGATGGACAACAGGGTGAAGTACCAGT |
| | TTCTATCATTAATAACACTGTTTACACAAAAGTTGATGGTGTTGATGTAGAATTGTTTGAAAATAAA |
| | ACAACATTACCTGTTAATGTAGCATTTGAGCTTTGGGCTAAGCGCAACATTAAACCAGTACCAGAGG |
| | TGAAAATACTCAATAATTTGGGTGTGGACATTGCTGCTAATACTGTGATCTGGGACTACAAAAGAGA |
| | TGCTCCAGCACATATATCTACTATTGGTGTTTGTTCTATGACTGACATAGCCAAGAAACCAACTGAA |
| | ACGATTTGTGCACCACTCACTGTCTTTTTTGATGGTAGAGTTGATGGTCAAGTAGACTTATTTAGAA |
| | ATGCCCGTAATGGTGTTCTTATTACAGAAGGTAGTGTTAAAGGTTTACAACCATCTGTAGGTCCCAA |
| | ACAAGCTAGTCTTAATGGAGTCACATTAATTGGAGAAGCCGTAAAAACACAGTTCAATTATTATAAG |
| | AAAGTTGATGGTGTTGTCCAACAATTACCTGAAACTTACTTTACTCAGAGTAGAAATTTACAAGAAT |
| | TTAAACCCAGGAGTCAAATGGAAATTGATTTCTTAGAATTAGCTATGGATGAATTCATTGAACGGTA |
| | TAAATTAGAAGGCTATGCCTTCGAACATATCGTTTATGGAGATTTTAGTCATAGTCAGTTAGGTGGT |
| | TTACATCTACTGATTGGACTAGCTAAACGTTTTAAGGAATCACCTTTTGAATTAGAAGATTTTATTC |
| | CTATGGACAGTACAGTTAAAAACTATTTCATAACAGATGCGCAAACAGGTTCATCTAAGTGTGTGTG |
| | TTCTGTTATTGATTTATTACTTGATGATTTTGTTGAAATAATAAAATCCCAAGATTTATCTGTAGTT |
| | TCTAAGGTTGTCAAAGTGACTATTGACTATACAGAAATTTCATTTATGCTTTGGTGTAAAGATGGCC |
| | ATGTAGAAACATTTTACCCAAAATTACAATCTAGTCAAGCGTGGCAACCGGGTGTTGCTATGCCTAA |
| | TCTTTACAAAATGCAAAGAATGCTATTAGAAAAGTGTGACCTTCAAAATTATGGTGATAGTGCAACA |
| | TTACCTAAAGGCATAATGATGAATGTCGCAAAATATACTCAACTGTGTCAATATTTAAACACATTAA |
| | CATTAGCTGTACCCTATAATATGAGAGTTATACATTTTGGTGCTGGTTCTGATAAAGGAGTTGCACC |
| | AGGTACAGCTGTTTTAAGACAGTGGTTGCCTACGGGTACGCTGCTTGTCGATTCAGATCTTAATGAC |
| | TTTGTCTCTGATGCAGATTCAACTTTGATTGGTGATTGTGCAACTGTACATACAGCTAATAAATGGG |
| | ATCTCATTATTAGTGATATGTACGACCCTAAGACTAAAAATGTTACAAAAGAAAATGACTCTAAAGA |
| | GGGTTTTTTCACTTACATTTGTGGGTTTATACAACAAAAGCTAGCTCTTGGAGGTTCCGTGGCTATA |
| | AAGATAACAGAACATTCTTGGAATGCTGATCTTTATAAGCTCATGGGACACTTCGCATGGTGGACAG |
| | CCTTTGTTACTAATGTGAATGCGTCATCATCTGAAGCATTTTTAATTGGATGTAATTATCTTGGCAA |
| | ACCACGCGAACAAATAGATGGTTATGTCATGCATGCAAATTACATATTTTGGAGGAATACAAATCCA |
| | ATTCAGTTGTCTTCCTATTCTTTATTTGACATGAGTAAATTTCCCCTTAAATTAAGGGGTACTGCTG |
| | TTATGTCTTTAAAAGAAGGTCAAATCAATGATATGATTTTATCTCTTCTTAGTAAAGGTAGACTTAT |
| | AATTAGAGAAAACAACAGAGTTGTTATTTCTAGTGATGTTCTTGTTAACAACTAAACGAACAATGTT |
| | TGTTTTTCTTGTTTTATTGCCACTAGTCTCTAGTCAGTGTGTTAATCTTACAACCAGAACTCAATTA |
| | CCCCCTGCATACACTAATTCTTTCACACGTGGTGTTTATTACCCTGACAAAGTTTTCAGATCCTCAG |
| | TTTTACATTCAACTCAGGACTTGTTCTTACCTTTCTTTTCCAATGTTACTTGGTTCCATGCTATCTC |
| | TGGGACCAATGGTACTAAGAGGTTTGATAACCCTGTCCTACCATTTAATGATGGTGTTTATTTTGCT |
| | TCCACTGAGAAGTCTAACATAATAAGAGGCTGGATTTTTGGTACTACTTTAGATTCGAAGACCCAGT |
| | CCCTACTTATTGTTAATAACGCTACTAATGTTGTTATTAAAGTCTGTGAATTTCAATTTTGTAATGA |
| | TCCATTTTTGGGTGTTTACCACAAAAACAACAAAAGTTGGATGGAAAGTGAGTTCAGAGTTTATTCT |
| | AGTGCGAATAATTGCACTTTTGAATATGTCTCTCAGCCTTTTCTTATGGACCTTGAAGGAAAACAGG |
| | GTAATTTCAAAAATCTTAGGGAATTTGTGTTTAAGAATATTGATGGTTATTTTAAAATATATTCTAA |
| | GCACACGCCTATTAATTTAGTGCGTGATCTCCCTCAGGGTTTTTCGGCTTTAGAACCATTGGTAGAT |
| | TTGCCAATAGGTATTAACATCACTAGGTTTCAAACTTTACTTGCTTTACATAGAAGTTATTTGACTC |
| | CTGGTGATTCTTCTTCAGGTTGGACAGCTGGTGCTGCAGCTTATTATGTGGGTTATCTTCAACCTAG |
| | GACTTTTCTATTAAAATATAATGAAAATGGAACCATTACAGATGCTGTAGACTGTGCACTTGACCCT |
| | CTCTCAGAAACAAAGTGTACGTTGAAATCCTTCACTGTAGAAAAAGGAATCTATCAAACTTCTAACT |
| | TTAGAGTCCAACCAACAGAATCTATTGTTAGATTTCCTAATATTACAAACTTGTGCCCTTTTGGTGA |
| | AGTTTTTAACGCCACCAGATTTGCATCTGTTTATGCTTGGAACAGGAAGAGAATCAGCAACTGTGTT |
| | GCTGATTATTCTGTCCTATATAATTCCGCATCATTTTCCACTTTTAAGTGTTATGGAGTGTCTCCTA |
| | CTAAATTAAATGATCTCTGCTTTACTAATGTCTATGCAGATTCATTTGTAATTAGAGGTGATGAAGT |
| | CAGACAAATCGCTCCAGGGCAAACTGGAAAGATTGCTGATTATAATTATAAATTACCAGATGATTTT |
| | ACAGGCTGCGTTATAGCTTGGAATTCTAACAATCTTGATTCTAAGGTTGGTGGTAATTATAATTACC |
| | TGTATAGATTGTTTAGGAAGTCTAATCTCAAACCTTTTGAGAGAGATATTTCAACTGAAATCTATCA |
| | GGCCGGTAGCACACCTTGTAATGGTGTTGAAGGTTTTAATTGTTACTTTCCTTTACAATCATATGGT |
| | TTCCAACCCACTTATGGTGTTGGTTACCAACCATACAGAGTAGTAGTACTTTCTTTTGAACTTCTAC |
| | ATGCACCAGCAACTGTTTGTGGACCTAAAAAGTCTACTAATTTGGTTAAAAACAAATGTGTCAATTT |
| | CAACTTCAATGGTTTAACAGGCACAGGTGTTCTTACTGAGTCTAACAAAAAGTTTCTGCCTTTCCAA |
| | CAATTTGGCAGAGACATTGATGACACTACTGATGCTGTCCGTGATCCACAGACACTTGAGATTCTTG |
| | ACATTACACCATGTTCTTTTGGTGGTGTCAGTGTTATAACACCAGGAACAAATACTTCTAACCAGGT |
| | TGCTGTTCTTTATCAGGGTGTTAACTGCACAGAAGTCCCTGTTGCTATTCATGCAGATCAACTTACT |
| | CCTACTTGGCGTGTTTATTCTACAGGTTCTAATGTTTTTCAAACACGTGCAGGCTGTTTAATAGGGG |
| | CTGAACATGTCAACAACTCATATGAGTGTGACATACCCATTGGTGCAGGTATATGCGCTAGTTATCA |
| | GACTCAGACTAATTCTCATCGGCGGGCACGTAGTGTAGCTAGTCAATCCATCATTGCCTACACTATG |
| | TCACTTGGTGCAGAAAATTCAGTTGCTTACTCTAATAACTCTATTGCCATACCCATAAATTTTACTA |
| | TTAGTGTTACCACAGAAATTCTACCAGTGTCTATGACCAAGACATCAGTAGATTGTACAATGTACAT |
| | TTGTGGTGATTCAACTGAATGCAGCAATCTTTTGTTGCAATATGGCAGTTTTTGTACACAATTAAAC |
| | CGTGCTTTAACTGGAATAGCTGTTGAACAAGACAAAAACACCCAAGAAGTTTTTGCACAAGTCAAAC |
| | AAATTTACAAAACACCACCAATTAAAGATTTTGGTGGTTTTAATTTTTCACAAATATTACCAGATCC |
| | ATCAAAACCAAGCAAGAGGTCATTTATTGAAGATCTACTTTTCAACAAAGTGACACTTGCAGATGCT |
| | GGCTTCATCAAACAATATGGTGATTGCCTTGGTGATATTGCTGCTAGAGACCTCATTTGTGCACAAA |
| | AGTTTAACGGCCTTACTGTTTTGCCACCTTTGCTCACAGATGAAATGATTGCTCAATACACTTCTGC |
| | ACTGTTAGCGGGTACAATCACTTCTGGTTGGACCTTTGGTGCAGGTGCTGCATTACAAATACCATTT |
| | GCTATGCAAATGGCTTATAGGTTTAATGGTATTGGAGTTACACAGAATGTTCTCTATGAGAACCAAA |
| | AATTGATTGCCAACCAATTTAATAGTGCTATTGGCAAAATTCAAGACTCACTTTCTTCCACAGCAAG |
| | TGCACTTGGAAAACTTCAAGATGTGGTCAACCAAAATGCACAAGCTTTAAACACGCTTGTTAAACAA |
| | CTTAGCTCCAATTTTGGTGCAATTTCAAGTGTTTTAAATGATATCCTTGCACGTCTTGACAAAGTTG |
| | AGGCTGAAGTGCAAATTGATAGGTTGATCACAGGCAGACTTCAAAGTTTGCAGACATATGTGACTCA |
| | ACAATTAATTAGAGCTGCAGAAATCAGAGGTTGTGCTAATCTTGOTGCTACTAAAATGTCAGAGTGT |
| | GTACTTGGACAATCAAAAAGAGTTGATTTTTGTGGAAAGGGCTATCATCTTATGTCCTTCCCTCAGT |
| | CAGCACCTCATGGTGTAGTCTTCTTGCATGTGACTTATGTCCCTGCACAAGAAAAGAACTTCACAAC |
| | TGCTCCTGCCATTTGTCATGATGGAAAAGCACACTTTCCTCGTGAAGGTGTCTTTGTTTCAAATGGC |
| | ACACACTGGTTTGTAACACAAAGGAATTTTTATGAACCACAAATCATTACTACACACAACACATTTG |
| | TGTCTGGTAACTGTGATGTTGTAATAGGAATTGTCAACAACACAGTTTATGATCCTTTGCAACCTGA |
| | ATTAGACTCATTCAAGGAGGAGTTAGATAAATATTTTAAGAATCATACATCACCAGATGTTGATTTA |
| | GGTGACATCTCTGGCATTAATGCTTCAGTTGTAAACATTCAAAAAGAAATTGACCGCCTCAATGAGG |
| | TTGCCAAGAATTTAAATGAATCTCTCATCGATCTCCAAGAACTTGGAAAGTATGAGCAGTATATAAA |
| | ATGGCCATGGTACATTTGGCTAGGTTTTATAGCTGGCTTGATTGCCATAGTAATGGTGACAATTATG |
| | CTTTGCTGTATGACCAGTTGCTGTAGTTGTCTCAAGGGCTGTTGTTCTTGTGGATCCTGCTGCAAAT |
| | TTGATGAAGACGACTCTGAGCCAGTGCTCAAAGGAGTCAAATTACATTACACATAAACGAACTTATG |
| | GATTTGTTTATGAGAATCTTCACAATTGGAACTGTAACTTTGAAGCAAGGTGAAATCAAGGATGCTA |
| | CTCCTTCAGATTTTGTTCGCGCTACTGCAACGATACCGATACAAGCCTCACTCCCTTTCGGATGGCT |
| | TATTGTTGGCGTTGCACTTCTTGCTGTTTTTCAGAGCGCTTCCAAAATCATAACCCTCAAAAAGAGA |
| | TGGCAACTAGCACTCTCCAAGGGTGTTCACTTTGTTTGCAACTTGCTGTTGTTGTTTGTAACAGTTT |
| | ACTCACACCTTTTGCTCGTTGCTGCTGGCCTTGAAGCCCCTTTTCTCTATCTTTATGCTTTAGTCTA |
| | CTTCTTGCAGAGTATAAACTTTGTAAGAATAATAATGAGGCTTTGGCTTTGCTGGAAATGCCGTTCC |
| | AAAAACCCATTACTTTATGATGCCAACTATTTTCTTTGCTGGCATACTAATTGTTACGACTATTGTA |
| | TACCTTACAATAGTGTAACTTCTTCAATTGTCATTACTTCAGGTGATGGCACAACAAGTCCTATTTC |
| | TGAACATGACTACCAGATTGGTGGTTATACTGAAAAATGGGAATCTGGAGTAAAAGACTGTGTTGTA |
| | TTACACAGTTACTTCACTTCAGACTATTACCAGCTGTACTCAACTCAATTGAGTACAGACACTGGTG |
| | TTGAACATGTTACCTTCTTCATCTACAATAAAATTGTTGATGAGCCTGAAGAACATGTCCAAATTCA |
| | CACAATCGACGGTTCATCCGGAGTTGTTAATCCAGTAATGGAACCAATTTATGATGAACCGACGACG |
| | ACTACTAGCGTGCCTTTGTAAGCACAAGCTGATGAGTACGAACTTATGTACTCATTCGTTTCGGAAG |
| | AGACAGGTACGTTAATAGTTAATAGCGTACTTCTTTTTCTTGCTTTCGTGGTATTCTTGCTAGTTAC |
| | ACTAGCCATCCTTACTGCGCTTCGATTGTGTGCGTACTGCTGCAATATTGTTAACGTGAGTCTTGTA |
| | AAACCTTCTTTTTACGTTTACTCTCGTGTTAAAAATCTGAATTCTTCTAGAGTTCCTGATCTTCTGG |
| | TCTAAACGAACTAAATATTATATTAGTTTTTCTGTTTGGAACTTTAATTTTAGCCATGGCAGATTCC |
| | AACGGTACTATTACCGTTGAAGAGCTTAAAAAGCTCCTTGAACAATGGAACCTAGTAATAGGTTTCC |
| | TATTCCTTACATGGATTTGTCTTCTACAATTTGCCTATGCCAACAGGAATAGGTTTTTGTATATAAT |
| | TAAGTTAATTTTCCTCTGGCTGTTATGGCCAGTAACTTTAGCTTGTTTTGTGCTTGCTGCTGTTTAC |
| | AGAATAAATTGGATCACCGGTGGAATTGCTATCGCAATGGCTTGTCTTGTAGGCTTGATGTGGCTCA |
| | GCTACTTCATTGCTTCTTTCAGACTGTTTGCGCGTACGCGTTCCATGTGGTCATTCAATCCAGAAAC |
| | TAACATTCTTCTCAACGTGCCACTCCATGGCACTATTCTGACCAGACCGCTTCTAGAAAGTGAACTC |
| | GTAATCGGAGCTGTGATCCTTCGTGGACATCTTCGTATTGCTGGACACCATCTAGGACGCTGTGACA |
| | TCAAGGACCTGCCTAAAGAAATCACTGTTGCTACATCACGAACGCTTTCTTATTACAAATTGGGAGC |
| | TTCGCAGCGTGTAGCAGGTGACTCAGGTTTTGCTGCATACAGTCGCTACAGGATTGGCAACTATAAA |
| | TTAAACACAGACCATTCCAGTAGCAGTGACAATATTGCTTTGCTTGTACAGTAAGTGACAACAGATG |
| | TTTCATCTCGTTGACTTTCAGGTTACTATAGCAGAGATATTACTAATTATTATGAGGACTTTTAAAG |
| | TTTCCATTTGGAATCTTGATTACATCATAAACCTCATAATTAAAAATTTATCTAAGTCACTAACTGA |
| | GAATAAATATTCTCAATTAGATGAAGAGCAACCAATGGAGATTGATTAAACGAACATGAAAATTATT |
| | CTTTTCTTGGCACTGATAACACTCGCTACTTGTGAGCTTTATCACTACCAAGAGTGTGTTAGAGGTA |
| | CAACAGTACTTTTAAAAGAACCTTGCTCTTCTGGAACATACGAGGGCAATTCACCATTTCATCCTCT |
| | AGCTGATAACAAATTTGCACTGACTTGCTTTAGCACTCAATTTGCTTTTGCTTGTCCTGACGGCGTA |
| | AAACACGTCTATCAGTTACGTGCCAGATCAGTTTCACCTAAACTGTTCATCAGACAAGAGGAAGTTC |
| | AAGAACTTTACTCTCCAATTTTTCTTATTGTTGCGGCAATAGTGTTTATAACACTTTGCTTCACACT |
| | CAAAAGAAAGACAGAATGATTGAACTTTCATTAATTGACTTCTATTTGTGCTTTTTAGCCTTTCTGC |
| | TATTCCTTGTTTTAATTATGCTTATTATCTTTTGGTTCTCACTTGAACTGCAAGATCATAATGAAAC |
| | TTGTCACGCCTAAACGAACATGAAATTTCTTGTTTTCTTAGGAATCATCACAACTGTAGCTGCATTT |
| | CACCAAGAATGTAGTTTACAGTCATGTACTTAACATCAACCATATGTAGTTGATGACCCGTGTCCTA |
| | TTCACTTCTATTCTAAATGGTATATTAGAGTAGGAGCTATAAAATCAGCACCTTTAATTGAATTGTG |
| | CGTGGATGAGGCTGGTTCTAAATCACCCATTCAGTGCATCGATATCGGTAATTATACAGTTTCCTGT |
| | TTACCTTTTACAATTAATTGCCAGGAACCTAAATTGGGTAGTCTTGTAGTGCGTTGTTCGTTCTATG |
| | AAGACTTTTTAGAGTATCATGACGTTCGTGTTGTTTTAGATTTCATCTAAACGAACAAACTAAATGT |
| | CTCTAAATGGACCCCAAAATCAGCGAAATGCACCCCGCATTACGTTTGGTGGACCCTCAGATTCAAC |
| | TGGCAGTAACCAGAATGGAGAACGCAGTGGGGCGCGATCAAAACAACGTCGGCCCCAAGGTTTACCC |
| | AATAATACTGCGTCTTGGTTCACCGCTCTCACTCAACATGGCAAGGAAGACCTTAAATTCCCTCGAG |
| | GACAAGGCGTTCCAATTAACACCAATAGCAGTCCAGATGACCAAATTGGCTACTACCGAAGAGCTAC |
| | CAGACGAATTCGTGGTGGTGACGGTAAAATGAAAGATCTCAGTCCAAGATGGTATTTCTACTACCTA |
| | GGAACTGGGCCAGAAGCTGGACTTCCCTATGGTGCTAACAAAGACGGCATCATATGGGTTGCAACTG |
| | AGGGAGCCTTGAATACACCAAAAGATCACATTGGCACCCGCAATCCTGCTAACAATGCTGCAATCGT |
| | GCTACAACTTCCTCAAGGAACAACATTGCCAAAAGGCTTCTACGCAGAAGGGAGCAGAGGCGGCAGT |
| | CAAGCCTCTTCTCGTTCCTCATCACGTAGTCGCAACAGTTCAAGAAATTCAACTCCAGGCAGCAGTA |
| | AACGAACTTCTCCTGCTAGAATGGCTGGCAATGGCGGTGATGCGGCTCTTGCTTTGCTGCTGCTTGA |
| | CAGATTGAACCAGCTTGAGAGCAAAATGTTTGGTAAAGGCCAACAACAACAAGGCCAAACTGTCACT |
| | AAGAAATCTGCTGCTGAGGCTTCTAAGAAGCCTCGGCAAAAACGTACTGCCACTAAAGCATACAATG |
| | TAACACAAGCTTTCGGCAGACGTGGTCCAGAACAAACCCAAGGAAATTTTGGGGACCAGGAACTAAT |
| | CAGACAAGGAACTGATTACAAACATTGGCCGCAAATTGCACAATTTGCCCCCAGCGCTTCAGCGTTC |
| | TTCGGAATGTCGCGCATTGGCATGGAAGTCACACCTTCGGGAACGTGGTTGACCTACACAGGTGCCA |
| | TCAAATTGGATGACAAAGATCCAAATTTCAAAGATCAAGTCATTTTGCTGAATAAGCATATTGACGC |
| | ATACAAAACATTCCCACCAACAGAGCCTAAAAAGGACAAAAAGAAGAAGGCTGATGAAACTCAAGCC |
| | TTACCGCAGAGACAGAAGAAACAGCAAACTGTGACTCTTCTTCCTGCTGCAGATTTGGATGATTTCT |
| | CCAAACAATTGCAACAATCCATGAGCAGTGCTGACTCAACTCAGGCCTAAACTCATGCAGACCACAC |
| | AAGGCAGATGGGCTATATAAACGTTTTCGCTTTTCCGTTTACGATATATAGTCTACTCTTGTGCAGA |
| | ATGAATTCTCGTAACTACATAGCACAAGTAGATGTAGTTAACTTTAATCTCACATAGCAATCTTTAA |
| | TCAGTGTGTAACATTAGGGAGGACTTGAAAGAGCCACCACATTTTCACCGAGGCCACGCGGAGTACG |
| | ATCGAGTGTACAGTGAACAATGCTAGGGAGAGCTGCCTATATGGAAGAGCCCTAATGTGTAAAATTA |
| | ATTTTAGTAGTGCTATCCCCATGTGATTTTAATAGCTTCTTAGGAGAA |
| 293 | GenBank Accession No. MW642250 (P.1 SARS-CoV-2 variant; Severe acute |
| | respiratory syndrome coronavirus 2 isolate SARS-CoV-2/human/ITA/ABR- |
| | IZSGC-TE30968/2021, complete genome) |
| | ATTAAAGGTTTATACCTTCCCAGGTAACAAACCAACCAACTTTCGATCTCTTGTAGATCTGTTCTCT |
| | AAACGAACTTTAAAATCTGTGTGGCTGTCACTCGGCTGCATGCTTAGTGCACTCACGCAGTATAATT |
| | AATAACTAATTACTGTCGTTGACAGGACACGAGTAACTCGTCTATCTTCTGCAGGCTGCTTACGGTT |
| | TCGTCCGTGTTGCAGCCGATCATCAGCACATCTAGGTTTTGTCCGGGTGTGACCGAAAGGTAAGATG |
| | GAGAGCCTTGTCCCTGGTTTCAACGAGAAAACACACGTCCAACTCAGTTTGCCTGTTTTACAGGTTC |
| | GCGACGTGCTCGTACGTGGCTTTGGAGACTCCGTGGAGGAGGTCTTATCAGAGGCACGTCAACATCT |
| | TAAAGATGGCACTTGTGGCTTAGTAGAAGTTGAAAAAGGCGTTTTGCCTCAACTTGAACAGCCCTAT |
| | GTGTTCATCAAACGTTCGGATGCTCGAACTGCACCTCATGGTCATGTTATGGTTGAGCTGGTAGCAG |
| | AACTCGAAGGCATTCAGTACGGTCGTAGTGGTGAGACACTTGGTGTCCTTGTCCCTCATGTGGGCGA |
| | AATACCAGTGGCTTACCGCAAGGTTCTTCTTCGTAAGAACGGTAATAAAGGAGCTGGTGGCCATAGT |
| | TACGGCGCCGATCTAAAGTCATTTGACTTAGGCGACGAGCTTGGCACTGATCCTTATGAAGACTTTC |
| | AAGAAAACTGGAACACTAAACATAGCAGTGGTGTTACCCGTGAACTCATGCGTGAGCTTAACGGAGG |
| | GGCATACACTCGCTATGTCGATAACAACTTCTGTGGCCCTGATGGCTACCCTCTTGAGTGCATTAAA |
| | GACCTTCTAGCACGTGCTGGTAAAGCTTCATGCACTTTGTCCGAACAACTGGACTTTATTGACACTA |
| | AGAGGGGTGTATACTGCTGCCGTGAACATGAGCATGAAATTGCTTGGTACACGGAACGTTCTGAAAA |
| | GAGCTATGAATTGCAGACACCTTTTGAAATTAAATTGGCAAAGAAATTTGACACCTTCAATGGGGAA |
| | TGTCCAAATTTTGTATTTCCCTTAAATTCCATAATCAAGACTATTCAACCAAGGGTTGAAAAGAAAA |
| | AGCTTGATGGCTTTATGGGTAGAATTCGATCTGTCTATCCAGTTGCGTCACCAAATGAATGCAACCA |
| | AATGTGCCTTTCAACTCTCATGAAGTGTGATCATTGTGGTGAAACTTCATGGCAGACGGGCGATTTT |
| | GTTAAAGCCACTTGCGAATTTTGTGGCACTGAGAATTTGACTAAAGAAGGTGCCACTACTTGTGGTT |
| | ACTTACCCCAAAATGCTGTTGTTAAAATTTATTGTCCAGCATGTCACAATTCAGAAGTAGGACCTGA |
| | GCATAGTCTTGCCGAATACCATAATGAATCTGGCTTGAAAACCATTCTTCGTAAGGGTGGTCGCACT |
| | ATTGCCTTTGGAGGCTGTGTGTTCTCTTATGTTGGTTGCCATAACAAGTGTGCCTATTGGGTTCCAC |
| | GTGCTAGCGCTAACATAGGTTGTAACCATACAGGTGTTGTTGGAGAAGGTTCCGAAGGTCTTAATGA |
| | CAACCTTCTTGAAATACTCCAAAAAGAGAAAGTCAACATCAATATTGTTGGTGACTTTAAACTTAAT |
| | GAAGAGATCGCCATTATTTTGGCATCTTTTTCTGCTTCCACAAGTGCTTTTGTGGAAACTGTGAAAG |
| | GTTTGGATTATAAAGCATTCAAACAAATTGTTGAATCCTGTGGTAATTTTAAAGTTACAAAAGGAAA |
| | AGCTAAAAAAGGTGCCTGGAATATTGGTGAACAGAAATCAATACTGAGTCCTCTTTATGCATTTGCA |
| | TCAGAGGCTGCTCGTGTTGTACGATCAATTTTCTCCCGCACTCTTGAAACTGCTCAAAATTCTGTGC |
| | GTGTTTTACAGAAGGCCGCTATAACAATACTAGATGGAATTTCACAGTATTCACTGAGACTCATTGA |
| | TGCTATGATGTTCACATCTGATTTGGCTACTAACAATCTAGTTGTAATGGCCTACATTACAGGTGGT |
| | GTTGTTCAGTTGACTTCGCAGTGGCTAACTAACATCTTTGGCACTGTTTATGAAAAACTCAAACCCG |
| | TCCTTGATTGGCTTGAAGAGAAGTTTAAGGAAGGTGTAGAGTTTCTTAGAGACGGTTGGGAAATTGT |
| | TAAATTTATCTCAACCTGTGCTTGTGAAATTGTCGGTGGACAAATTGTCACCTGTGCAAAGGAAATT |
| | AAGGAGAGTGTTCAGACATTCTTTAAGCTTGTAAATAAATTTTTGGCTTTGTGTGCTGACTCTATCA |
| | TTATTGGTGGAGCTAAACTTAAAGCCTTGAATTTAGGTGAAACATTTGTCACGCACTCAAAGGGATT |
| | GTACAGAAAGTGTGTTAAATCCAGAGAAGAAACTGGCCTACTCATGCCTCTAAAAGCCCCAAAAGAA |
| | ATTATCTTCTTAGAGGGAGAAACACTTCCCACAGAAGTGTTAACAGAGGAAGTTGTCTTGAAAACTG |
| | GTGATTTACAACCATTAGAACAACCTACTAGTGAAGCTGTTGAAGCTCCATTGGTTGGTACACCAGT |
| | TTGTATTAACGGGCTTATGTTGCTCGAAATCAAAGACACAGAAAAGTACTGTGCCCTTGCACCTAAT |
| | ATGATGGTAACAAACAATACCTTCACACTCAAAGGCGGTGCACCAACAAAGGTTACTTTTGGTGATG |
| | ATACTGTGATAGAAGTGCAAGGTTACAAGAGTGTGAATATCACTTTTGAACTTGATGAAAGGATTGA |
| | TAAAGTACTTAATGAGAAGTGCTCTGCCTATACAGTTGAACTCGGTACAGAAGTAAATGAGTTCGCC |
| | TGTGTTGTGGCAGATGCTGTCATAAAAACTTTGCAACCAGTATCTGAATTACTTACACCACTGGGCA |
| | TTGATTTAGATGAGTGGAGTATGGCTACATACTACTTATTTGATGAGTCTGGTGAGTTTAAATTGGC |
| | TTCACATATGTATTGTTCTTTTTACCCTCCAGATGAGGATGAAGAAGAAGGTGATTGTGAAGAAGAA |
| | GAGTTTGAGCCATCAACTCAATATGAGTATGGTATTGAAGATGATTACCAAGGTAAACCTTTGGAAT |
| | TTGGTGCCACTTCTGCTGCTCTTCAACCTGAAGAAGAGCAAGAAGAAGATTGGTTAGATGATGATAG |
| | TCAACAAACTGTTGGTCAACAAGACGGCAGTGAGGACAATCAGACAACTACTATTCAAACAATTGTT |
| | GAGGTTCAACCTCAATTAGAGATGGAACTTACACCAGTTGTTCAGACTATTGAAGTGAATAGTTTTA |
| | GTGGTTATTTAAAACTTACTGACAATGTATACATTAAAAATGCAGACATTGTGGAAGAAGCTAAAAA |
| | GGTAAAACCAACAGTGGTTGTTAATGCAGCCAATGTTTACCTTAAACATGGAGGAGGTGTTGCAGGA |
| | GCCTTAAATAAGGCTACTAACAATGCCATGCAAGTTGAATCTGATGATTACATAGCTACTAATGGAC |
| | CACTTAAAGTGGGTGGTAGTTGTGTTTTAAGCGGACACAATCTTGCTAAACACTGTCTTCATGTTGT |
| | CGGCCCAAATGTTAACAAAGGTGAAGACATTCAACTTCTTAAGAGTGCTTATGAAAATTTTAATCAG |
| | CACGAAGTTCTACTTGCACCATTATTATCAGCTGGTATTTTTGGTGCTGACCCTATACATTCTTTAA |
| | GAGTTTGTGTAGATACTGTTCGCACAAATGTCTACTTAGCTGTCTTTGATAAAAATCTCTATGACAA |
| | ACTTGTTTTAAGCTTTTTGGAAATGAAGAGTGAAAAGCAAGTTGAACAAAAGATCGCTGAGATTCCT |
| | AAAGAGGAAGTTAAGCCATTTATAACTGAAAGTAAACCTTCAGTTGAACAGAGAAAACAAGATGATA |
| | AGAAAATCAAAGCTTGTGTTGAAGAAGTTACAACAACTCTGGAAGAAACTAAGTTCCTCACAGAAAA |
| | CTTGTTACTTTATATTGACATTAATGGCAATCTTCATCCAGATTCTGCCACTCTTGTTAGTGACATT |
| | GACATCACTTTCTTAAAGAAAGATGCTCCATATATAGTGGGTGATGTTGTTCAAGAGGGTGTTTTAA |
| | CTGCTGTGGTTATACCTACTAAAAAGGCTGGTGGCACTACTGAAATGCTAGCGAAAGCTTTGAGAAA |
| | AGTGCCAACAGACAATTATATAACCACTTACCCGGGTCAGGGTTTAAATGGTTACACTGTAGAGGAG |
| | GCAAAGACAGTGCTTAAAAAGTGTAAAAGTGCCTTTTACATTCTACCATCTATTATCTCTAATGAGA |
| | AGCAAGAAATTCTTGGAACTGTTTCTTGGAATTTGCGAGAAATGCTTGCACATGCAGAAGAAACACG |
| | CAAATTAATGCCTGTCTGTGTGGAAACTAAAGCCATAGTTTCAACTATACAGCGTAAATATAAGGGT |
| | ATTAAAATACAAGAGGGTGTGGTTGATTATGGTGCTAGATTTTACTTTTACACCAGTAAAACAACTG |
| | TAGCGTCACTTATCAACACACTTAACGATCTAAATGAAACTCTTGTTACAATGCCACTTGGCTATGT |
| | AACACATGGCTTAAATTTGGAAGAAGCTGCTCGGTATATGAGATCTCTCAAAGTGCCAGCTACAGTT |
| | TCTGTTTCTTCACCTGATGCTGTTACAGCGTATAATGGTTATCTTACTTCTTCTTCTAAAACACCTG |
| | AAGAACATTTTATTGAAACCATCTCACTTGCTGGTTCCTATAAAGATTGGTCCTATTCTGGACAATC |
| | TACACAACTAGGTATAGAATTTCTTAAGAGAGGTGATAAAAGTGTATATTACACTAGTAATCCTACC |
| | ACATTCCACCTAGATGGTGAAGTTATCACCTTTGACAATCTTAAGACACTTCTTTCTTTGAGAGAAG |
| | TGAGGACTATTAAGGTGTTTACAACAGTAGACAACATTAACCTCCACACGCAAGTTGTGGACATGTC |
| | AATGACATATGGACAACAGTTTGGTCCAACTTATTTGGATGGAGCTGATGTTACTAAAATAAAACCT |
| | CATAATTCACATGAAGGTAAAACATTTTATGTTTTACCTAATGATGACACTCTACGTGTTGAGGCTT |
| | TTGAGTACTACCACACAACTGATCCTAGTTTTCTGGGTAGGTACATGTCAGCATTAAATCACACTAA |
| | AAAGTGGAAATACCCACAAGTTAATGGTTTAACTTCTATTAAATGGGCAGATAACAACTGTTATCTT |
| | GCCACTGCATTGTTAACACTCCAACAAATAGAGTTGAAGTTTAATCCACCTGCTCTACAAGATGCTT |
| | ATTACAGAGCAAGGGCTGGTGAAGCTGCTAACTTTTGTGCACTTATCTTAGCCTACTGTAATAAGAC |
| | AGTAGGTGAGTTAGGTGATGTTAGAGAAACAATGAGTTACTTGTTTCAACATGCCAATTTAGATTCT |
| | TGCAAAAGAGTCTTGAACGTGGTGTGTAAAACTTGTGGACAACAGCAGACAACCCTTAAGGGTGTAG |
| | AAGCTGTTATGTACATGGGCACACTTTCTTATGAACAATTTAAGAAAGGTGTTCAGATACCTTGTAC |
| | GTGTGGTAAACAAGCTACACAATATCTAGTACAACAGGAGTCACCTTTTGTTATGATGTCAGCACCA |
| | CCTGCTCAGTATGAACTTAAGCATGGTACATTTACTTGTGCTAGTGAGTACACTGGTAATTACCAGT |
| | GTGGTCACTATAAACATATAACTTCTAAAGAAACTTTGTATTGCATAGACGGTGCTTTACTTACAAA |
| | GTCCTCAGAATACAAAGGTCCTATTACGGATGTTTTCTACAAAGAAAACAGTTACACAACAACCATA |
| | AAACCAGTTACTTATAAATTGGATGGTGTTGTTTGTACAGAAATTGACCCTAAGTTGGACAATTATT |
| | ATAAGAAAGACAATTCTTATTTCACAGAGCAACCAATTGATCTTGTACCAAACCAACCATATCCAAA |
| | CGCAAGCTTCGATAATTTTAAGTTTGTATGTGATAATATCAAATTTGCTGATGATTTAAACCAGTTA |
| | ACTGGTTATAAGAAACCTGCTTCAAGAGAGCTTAAAGTTACATTTTTCCCTGACTTAAATGGTGATG |
| | TGGTGGCTATTGATTATAAACACTACACACCCTCTTTTAAGAAAGGAGCTAAATTGTTACATAAACC |
| | TATTGTTTGGCATGTTAACAATGCAACTAATAAAGCCACGTATAAACCAAATACCTGGTGTATACGT |
| | TGTCTTTGGAGCACAAAACCGGTTGAAACATCAAATTCGTTTGATGTACTGAAGTCAGAGGACGCGC |
| | AGGGAATGGATAATCTTGCCTGCGAAGATCTAAAACCAGTCTCTGAAGAAGTAGTGGAAAATCCTAC |
| | CATACAGAAAGACGTTCTTGAGTGTAATGTGAAAACTACCGAAGTTGTAGGAGACATTATACTTAAA |
| | CCAGCAAATAATAGTTTAAAAATTACAGAAGAGGTTGGCCACACAGATCTAATGGCTGCTTATGTAG |
| | ACAATTCTAGTCTTACTATTAAGAAACCTAATGAATTATCTAGAGTGTTAGGTTTGAAAACCCTTGC |
| | TACTCATGGTTTAGCTGCTGTTAATAGTGTCCCTTGGGATACTATAGCTAATTATGCTAAGCCTTTT |
| | CTTAACAAAGTTGTTAGTACAACTACTAACATAGTTACACGGTGTTTAAACCGTGTTTGTACTAATT |
| | ATATGCCTTATTTCTTTACTTTATTGCTACAATTGTGTACTTTTACTAGAAGTACAAATTCTAGAAT |
| | TAAAGCATCTATGCCGACTACTATAGCAAAGAATACTGTTAAGAGTGTCGGTAAATTTTGTCTAGAG |
| | GCTTCATTTAATTATTTGAAGTCACCTAATTTTTCTAAACTGATAAATATTATAATTTGGTTTTTAC |
| | TATTAAGTGTTTGCCTAGGTTCTTTAATCTACTCAACCGCTGCTTTAGGTGTTTTAATGTCTAATTT |
| | AGGCATGCCTTCTTACTGTACTGGTTACAGAGAAGGCTATTTGAACTCTACTAATGTCACTATTGCA |
| | ACCTACTGTACTGGTTCTATACCTTGTAGTGTTTGTCTTAGTGGTTTAGATTCTTTAGACACCTATC |
| | CTTCTTTAGAAACTATACAAATTACCATTTCATCTTTTAAATGGGATTTAACTGCTTTTGGCTTAGT |
| | TGCAGAGTGGTTTTTGGCATATATTCTTTTCACTAGGTTTTTCTATGTACTTGGATTGGCTGCAATC |
| | ATGCAATTGTTTTTCAGCTATTTTGCAGTACATTTTATTAGTAATTCTTGGCTTATGTGGTTAATAA |
| | TTAATCTTGTACAAATGGCCCCGATTTCAGCTATGGTTAGAATGTACATCTTCTTTGCATCATTTTA |
| | TTATGTATGGAAAAGTTATGTGCATGTTGTAGACGGTTGTAATTCATCAACTTGTATGATGTGTTAG |
| | AAACGTAATAGAGCAACAAGAGTCGAATGTACAACTATTGTTAATGGTGTTAGAAGGTCCTTTTATG |
| | TCTATGCTAATGGAGGTAAAGGCTTTTGCAAACTACACAATTGGAATTGTGTTAATTGTGATACATT |
| | CTGTGCTGGTAGTACATTTATTAGTGATGAAGTTGCGAGAGACTTGTCACTACAGTTTAAAAGACCA |
| | ATAAATCCTACTGACCAGTCTTCTTACATCGTTGATAGTGTTACAGTGAAGAATGGTTCCATCCATC |
| | TTTACTTTGATAAAGCTGGTCAAAAGACTTATGAAAGACATTCTCTCTCTCATTTTGTTAACTTAGA |
| | CAACCTGAGAGCTAATAACACTAAAGGTTCATTGCCTATTAATGTTATAGTTTTTGATGGTAAATCA |
| | AAATGTGAAGAATCATCTGCAAAATCAGCGTCTGTTTACTACAGTCAGCTTATGTGTCAACCTATAC |
| | TGTTACTAGATCAGGCATTAGTGTCTGATGTTGGTGATAGTGCGGAAGTTGCAGTTAAAATGTTTGA |
| | TGCTTACGTTAATACGTTTTCATCAACTTTTAACGTACCAATGGAAAAACTCAAAACACTAGTTGCA |
| | ACTGCAGAAGCTGAACTTGCAAAGAATGTGTCCTTAGACAATGTCTTATCTACTTTTATTTCAGCAG |
| | CTCGGCAAGGGTTTGTTGATTCAGATGTAGAAACTAAAGATGTTGTTGAATGTCTTAAATTGTCACA |
| | TCAATCTGACATAGAAGTTACTGGCGATAGTTGTAATAACTATATGCTCACCTATAACAAAGTTGAA |
| | AACATGACACCCCGTGACCTTGGTGCTTGTATTGACTGTAGTGCGCGTCATATTAATGCGCAGGTAG |
| | CAAAAAGTCACAACATTGCTTTGATATGGAACGTTAAAGATTTCATGTCATTGTCTGAACAACTACG |
| | AAAACAAATACGTAGTGCTGCTAAAAAGAATAACTTACCTTTTAAGTTGACATGTGCAACTACTAGA |
| | CAAGTTGTTAATGTTGTAACAACAAAGATAGCACTTAAGGGTGGTAAAATTGTTAATAATTGGTTGA |
| | AGCAGTTAATTAAAGTTACACTTGTGTTCCTTTTTGTTGCTGCTATTTTCTATTTAATAACACCTGT |
| | TCATGTCATGTCTAAACATACTGACTTTTCAAGTGAAATCATAGGATACAAGGCTATTGATGGTGGT |
| | GTCACTCGTGACATAGCATCTACAGATACTTGTTTTGCTAACAAACATGCTGATTTTGACACATGGT |
| | TTAGCCAGCGTGGTGGTAGTTATACTAATGACAAAGCTTGCCCATTGATTGCTGCAGTCATAACAAG |
| | AGAAGTGGGTTTTGTCGTGCCTGGTTTGCCTGGCACGATATTACGCACAACTAATGGTGACTTTTTG |
| | CATTTCTTACCTAGAGTTTTTAGTGCAGTTGGTAACATCTGTTACACACCATCAAAACTTATAGAGT |
| | ACACTGACTTTGCAACATCAGCTTGTGTTTTGGCTGCTGAATGTACAATTTTTAAAGATGCTTCTGG |
| | TAAGCCAGTACCATATTGTTATGATACCAATGTACTAGAAGGTTCTGTTGCTTATGAAAGTTTACGC |
| | CCTGACACACGTTATGTGCTCATGGATGGCTCTATTATTCAATTTCCTAACACCTACCTTGAAGGTT |
| | CTGTTAGAGTGGTAACAACTTTTGATTCTGAGTACTGTAGGCACGGCACTTGTGAAAGATCAGAAGC |
| | TGGTGTTTGTGTATCTACTAGTGGTAGATGGGTACTTAACAATGATTATTACAGATCTTTACCAGGA |
| | GTTTTCTGTGGTGTAGATGCTGTAAATTTACTTACTAATATGTTTACACCACTAATTCAACCTATTG |
| | GTGCTTTGGACATATCAGCATCTATAGTAGCTGGTGGTATTGTAGCTATCGTAGTAACATGCCTTGC |
| | CTACTATTTTATGAGGTTTAGAAGAGCTTTTGGTGAATACAGTCATGTAGTTGCCTTTAATACTTTA |
| | CTATTCCTTATGTCATTCACTGTACTCTGTTTAACACCAGTTTACTCATTCTTACCTGGTGTTTATT |
| | CTGTTATTTACTTGTACTTGACATTTTATCTTACTAATGATGTTTCTTTTTTAGCACATATTCAGTG |
| | GATGGTTATGTTCACACCTTTAGTACCTTTCTGGATAACAATTGCTTATATCATTTGTATTTCCACA |
| | AAGCATTTCTATTGGTTCTTTAGTAATTACCTAAAGAGACGTGTAGTCTTTAATGGTGTTTCCTTTA |
| | GTACTTTTGAAGAAGCTGCGCTGTGCACCTTTTTGTTAAATAAAGAAATGTATCTAAAGTTGCGTAG |
| | TGATGTGCTATTACCTCTTACGCAATATAATAGATACTTAGCTCTTTATAATAAGTACAAGTATTTT |
| | AGTGGAGCAATGGATACAACTAGCTACAGAGAAGCTGCTTGTTGTCATCTCGCAAAGGCTCTCAATG |
| | ACTTCAGTAACTCAGGTTCTGATGTTCTTTACCAACCACCACAAACCTCTATCACCTCAGCTGTTTT |
| | GCAGAGTGGTTTTAGAAAAATGGCATTCCCATCTGGTAAAGTTGAGGGTTGTATGGTACAAGTAACT |
| | TGTGGTACAACTACACTTAACGGTCTTTGGCTTGATGACGTAGTTTACTGTCCAAGACATGTGATCT |
| | GCACCTCTGAAGACATGCTTAACCCTAATTATGAAGATTTACTCATTCGTAAGTCTAATCATAATTT |
| | CTTGGTACAGGCTGGTAATGTTCAACTCAGGGTTATTGGACATTCTATGCAAAATTGTGTACTTAAG |
| | CTTAAGGTTGATACAGCCAATCCTAAGACACCTAAGTATAAGTTTGTTCGCATTCAACCAGGACAGA |
| | CTTTTTCAGTGTTAGCTTGTTACAATGGTTCACCATCTGGTGTTTACCAATGTGCTATGAGGCCCAA |
| | TTTCACTATTAAGGGTTCATTCCTTAATGGTTCATGTGGTAGTGTTGGTTTTAACATAGATTATGAC |
| | TGTGTCTCTTTTTGTTACATGCACCATATGGAATTACCAACTGGAGTTCATGCTGGCACAGACTTAG |
| | AAGGTAACTTTTATGGACCTTTTGTTGACAGGCAAACAGCACAAGCAGCTGGTACGGACACAACTAT |
| | TACAGTTAATGTTTTAGCTTGGTTGTACGCTGCTGTTATAAATGGAGACAGGTGGTTTCTCAATCGA |
| | TTTACCACAACTCTTAATGACTTTAACCTTGTGGCTATGAAGTACAATTATGAACCTCTAACACAAG |
| | ACCATGTTGACATACTAGGACCTCTTTCTGCTCAAACTGGAATTGCCGTTTTAGATATGTGTGCTTC |
| | ATTAAAAGAATTACTGCAAAATGGTATGAATGGACGTACCATATTGGGTAGTGCTTTATTAGAAGAT |
| | GAATTTACACCTTTTGATGTTGTTAGACAATGCTCAGGTGTTACTTTCCAAAGTGCAGTGAAAAGAA |
| | CAATCAAGGGTACACACCACTGGTTGTTACTCACAATTTTGACTTCACTTTTAGTTTTAGTCCAGAG |
| | TACTCAATGGTCTTTGTTCTTTTTTTTGTATGAAAATGCCTTTTTACCTTTTGCTATGGGTATTATT |
| | GCTATGTCTGCTTTTGCAATGATGTTTGTCAAACATAAGCATGCATTTCTCTGTTTGTTTTTGTTAC |
| | CTTCTCTTGCCACTGTAGCTTATTTTAATATGGTCTATATGCCTGCTAGTTGGGTGATGCGTATTAT |
| | GACATGGTTGGATATGGTTGATACTAGTTTGAAGCTAAAAGACTGTGTTATGTATGCATCAGCTGTA |
| | GTGTTACTAATCCTTATGACAGCAAGAACTGTGTATGATGATGGTGCTAGGAGAGTGTGGACACTTA |
| | TGAATGTCTTGACACTCGTTTATAAAGTTTATTATGGTAATGCTTTAGATCAAGCCATTTCCATGTG |
| | GGCTCTTATAATCTCTGTTACTTCTAACTACTCAGGTGTAGTTACAACTGTCATGTTTTTGGCCAGA |
| | GGTATTGTTTTTATGTGTGTTGAGTATTGCCCTATTTTCTTCATAACTGGTAATACACTTCAGTGTA |
| | TAATGCTAGTTTATTGTTTCTTAGGCTATTTTTGTACTTGTTACTTTGGCCTCTTTTGTTTACTCAA |
| | CCGCTACTTTAGACTGACTCTTGGTGTTTATGATTACTTAGTTTCTACACAGGAGTTTAGATATATG |
| | AATTCACAGGGACTACTCCCACCCAAGAATAGCATAGATGCCTTCAAACTCAACATTAAATTGTTGG |
| | GTGTTGGTGGCAAACCTTGTATCAAAGTAGCCACTGTACAGTCTAAAATGTCAGATGTAAAGTGCAC |
| | ATCAGTAGTCTTACTCTCAGTTTTGCAACAACTCAGAGTAGAATCATCATCTAAATTGTGGGCTCAA |
| | TGTGTCCAGTTACACAATGACATTCTCTTAGCTAAAGATACTACTGAAGCCTTTGAAAAAATGGTTT |
| | CACTACTTTCTGTTTTGCTTTCCATGCAGGGTGCTGTAGACATAAACAAGCTTTGTGAAGAAATGCT |
| | GGACAACAGGGCAACCTTACAAGCTATAGCCTCAGAGTTTAGTTCCCTTCCATCATATGCAGCTTTT |
| | GCTACTGCTCAAGAAGCTTATGAGCAGGCTGTTGCTAATGGTGATTCTGAAGTTGTTCTTAAAAAGT |
| | TGAAGAAGTCTTTGAATGTGGCTAAATCTGAATTTGACCGTGATGCAGCCATGCAACGTAAGTTGGA |
| | AAAGATGGCTGATCAAGCTATGACCCAAATGTATAAACAGGCTAGATCTGAGGACAAGAGGGCAAAA |
| | GTTACTAGTGCTATGCAGACAATGCTTTTCACTATGCTTAGAAAGTTGGATAATGATGCACTCAACA |
| | ACATTATCAACAATGCAAGAGATGGTTGTGTTCCCTTGAACATAATACCTCTTACAACAGCAGCCAA |
| | ACTAATGGTTGTCATACCAGACTATAACACATATAAAAATACGTGTGATGGTACAACATTTACTTAT |
| | GCATCAGCATTGTGGGAAATCCAACAGGTTGTAGATGCAGATAGTAAAATTGTTCAACTTAGTGAAA |
| | TTAGTATGGACAATTCACCTAATTTAGCATGGCCTCTTATTGTAACAGCTTTAAGGGCCAATTCTGC |
| | TGTCAAATTACAGAATAATGAGCTTAGTCCTGTTGCACTACGACAGATGTCTTGTGCTGCCGGTACT |
| | ACACAAACTGCTTGCACTGATGACAATGCGTTAGCTTATTACAACACAACAAAGGGAGGTAGGTTTG |
| | TACTTGCACTGTTATCCGATTTACAGGATTTGAAATGGGCTAGATTCCCTAAGAGTGATGGAACTGG |
| | TACTATCTATACAGAACTGGAACCACCTTGTAGGTTTGTTACAGACACACCTAAAGGTCCTAAAGTG |
| | AAGTATTTATACTTTATTAAAGGATTAAACAACCTAAATAGAGGTATGGTACTTGGTAGTTTAGCTG |
| | CCACAGTACGTCTACAAGCTGGTAATGCAACAGAAGTGCCTGCCAATTCAACTGTATTATCTTTCTG |
| | TGCTTTTGCTGTAGATGCTGCTAAAGCTTACAAAGATTATCTAGCTAGTGGGGGACAACCAATCACT |
| | AATTGTGTTAAGATGTTGTGTACACACACTGGTACTGGTCAGGCAATAACAGTTACACCGGAAGCCA |
| | ATATGGATCAAGAATCCTTTGGTGGTGCATCGTGTTGTCTGTACTGCCGTTGCCACATAGATCATCC |
| | AAATCCTAAAGGATTTTGTGACTTAAAAGGTAAGTATGTACAAATACCTACAACTTGTGCTAATGAC |
| | CCTGTGGGTTTTACACTTAAAAACACAGTCTGTACCGTCTGCGGTATGTGGAAAGGTTATGGCTGTA |
| | GTTGTGATCAACTCCGCGAACCCATGCTTCAGTCAGCTGATGCACAATCGTTTTTAAACGGGTTTGC |
| | GGTGTAAGTGCAGCCCGTCTTACACCGTGCGGCACAGGCACTAGTACTGATGTCGTATACAGGGCTT |
| | TTGACATCTACAATGATAAAGTAGCTGGTTTTGCTAAATTCCTAAAAACTAATTGTTGTCGCTTCCA |
| | AGAAAAGGACGAAGATGACAATTTAATTGATTCTTACTTTGTAGTTAAGAGACACACTTTCTCTAAC |
| | TACCAACATGAAGAAACAATTTATAATTTACTTAAGGATTGTCCAGCTGTTGCTAAACATGACTTCT |
| | TTAAGTTTAGAATAGACGGTGACATGGTACCACATATATCACGTCAACGTCTTACTAAATACACAAT |
| | GGCAGACCTCGTCTATGCTTTAAGGCATTTTGATGAAGGTAATTGTGATACATTAAAAGAAATACTT |
| | GTCACATACAATTGTTGTGATGATGATTATTTCAATAAAAAGGACTGGTATGATTTTGTAGAAAACC |
| | CAGATATATTACGCGTATACGCCAACTTAGGTGAACGTGTACGCCAAGCTTTGTTAAAAACAGTACA |
| | ATTCTGTGATGCCATGCGAAATGCTGGTATTGTTGGTGTACTGACATTAGATAATCAAGATCTCAAT |
| | GGTAACTGGTATGATTTCGGTGATTTCATACAAACCACGCCAGGTAGTGGAGTTCCTGTTGTAGATT |
| | CTTATTATTCATTGTTAATGCCTATATTAACCTTGACCAGGGCTTTAACTGCAGAGTCACATGTTGA |
| | CACTGACTTAACAAAGCCTTACATTAAGTGGGATTTGTTAAAATATGACTTCACGGAAGAGAGGTTA |
| | AAACTCTTTGACCGTTATTTTAAATATTGGGATCAGACATACCACCCAAATTGTGTTAACTGTTTGG |
| | ATGACAGATGCATTCTGCATTGTGCAAACTTTAATGTTTTATTCTCTACAGTGTTCCCACTTACAAG |
| | TTTTGGACCACTAGTGAGAAAAATATTTGTTGATGGTGTTCCATTTGTAGTTTCAACTGGATACCAC |
| | TTCAGAGAGCTAGGTGTTGTACATAATCAGGATGTAAACTTACATAGCTCTAGACTTAGTTTTAAGG |
| | AATTACTTGTGTATGCTGCTGACCCTGCTATGCACGCTGCTTCTGGTAATCTATTACTAGATAAACG |
| | CACTACGTGCTTTTCAGTAGCTGCACTTACTAACAATGTTGCTTTTCAAACTGTCAAACCCGGTAAT |
| | TTTAACAAAGACTTCTATGACTTTGCTGTGTCTAAGGGTTTCTTTAAGGAAGGAAGTTCTGTTGAAT |
| | TAAAACACTTCTTCTTTGCTCAGGATGGTAATGCTGCTATCAGCGATTATGACTACTATCGTTATAA |
| | TCTACCAACAATGTGTGATATCAGACAACTACTATTTGTAGTTGAAGTTGTTGATAAGTACTTTGAT |
| | TGTTACGATGGTGGCTGTATTAATGCTAACCAAGTCATCGTCAACAACCTAGACAAATCAGCTGGTT |
| | TTCCATTTAATAAATGGGGTAAGGCTAGACTTTATTATGATTCAATGAGTTATGAGGATCAAGATGC |
| | ACTTTTCGCATATACAAAACGTAATGTCATCCCTACTATAACTCAAATGAATCTTAAGTATGCCATT |
| | AGTGCAAAGAATAGAGCTCGCACCGTAGCTGGTGTCTCTATCTGTAGTACTATGACCAATAGACAGT |
| | TTCATCAAAAATTATTGAAATCAATAGCCGCCACTAGAGGAGCTACTGTAGTAATTGGAACAAGCAA |
| | ATTCTATGGTGGTTGGCACAACATGTTAAAAACTGTTTATAGTGATGTAGAAAACCCTCACCTTATG |
| | GGTTGGGATTATCCTAAATGTGATAGAGCCATGCCTAACATGCTTAGAATTATGGCCTCACTTGTTC |
| | TTGCTCGCAAACATACAACGTGTTGTAGCTTGTCACACCGTTTCTATAGATTAGCTAATGAGTGTGC |
| | TCAAGTATTGAGTGAAATGGTCATGTGTGGCGGTTCACTATATGTTAAACCAGGTGGAACCTCATCA |
| | GGAGATGCCACAACTGCTTATGCTAATAGTGTTTTTAACATTTGTCAAGCTGTCACGGCCAATGTTA |
| | ATGCACTTTTATCTACTGATGGTAACAAAATTGCCGATAAGTATGTCCGCAATTTACAACACAGACT |
| | TTATGAGTGTCTCTATAGAAATAGAGATGTTGACACAGACTTTGTGAATGAGTTTTACGCATATTTG |
| | CGTAAACATTTCTCAATGATGATACTCTCTGACGATGCTGTTGTGTGTTTCAATAGCACTTATGCAT |
| | CTCAAGGTCTAGTGGCTAGCATAAAGAACTTTAAGTCAGTTCTTTATTATCAAAACAATGTTTTTAT |
| | GTCTGAAGCAAAATGTTGGACTGAGACTGACCTTACTAAAGGACCTCATGAATTTTGCTCTCAACAT |
| | ACAATGCTAGTTAAACAGGGTGATGATTATGTGTACCTTCCTTACCCAGATCCATCAAGAATCCTAG |
| | GGGCCGGCTGTTTTGTAGATGATATCGTAAAAACAGATGGTACACTTATGATTGAACGGTTCGTGTC |
| | TTTAGCTATAGATGCTTACCCACTTACTAAACATCCTAATCAGGAGTATGCTGATGTCTTTCATTTG |
| | TACTTACAATACATAAGAAAGCTACATGATGAGTTAACAGGACACATGTTAGACATGTATTCTGTTA |
| | TGCTTACTAATGATAACACTTCAAGGTATTGGGAACCTGAGTTTTATGAGGCTATGTACACACCGCA |
| | TACAGTCTTACAGGCTGTTGGGGCTTGTGTTCTTTGCAATTCACAGACTTCATTAAGATGTGGTGCT |
| | TGCATACGTAGACCATTCTTATGTTGTAAATGCTGTTACGACCATGTCATATCAACATCACATAAAT |
| | TAGTCTTGTCTGTTAATCCGTATGTTTGCAATGCTCCAGGTTGTGATGTCACAGATGTGACTCAACT |
| | TTACTTAGGAGGTATGAGCTATTATTGTAAATCACATAAACCACCCATTAGTTTTCCATTGTGTGCT |
| | AATGGACAAGTTTTTGGTTTATATAAAAATACATGTGTTGGTAGCGATAATGTTACTGACTTTAATG |
| | CAATTGCAACATGTGACTGGACAAATGCTGGTGATTACATTTTAGCTAACACCTGTACTGAAAGACT |
| | CAAGCTTTTTGCAGCAGAAACGCTCAAAGCTACTGAGGAGACATTTAAACTGTCTTATGGTATTGCT |
| | ACTGTACGTGAAGTGCTGTCTGACAGAGAATTACATCTTTCATGGGAAGTTGGTAAACCTAGACCAC |
| | CACTTAACCGAAATTATGTCTTTACTGGTTATCGTGTAACTAAAAACAGTAAAGTACAAATAGGAGA |
| | GTACACCTTTGAAAAAGGTGACTATGGTGATGCTGTTGTTTACCGAGGTACAACAACTTACAAATTA |
| | AATGTTGGTGATTATTTTGTGCTGACATCACATACAGTAATGCCATTAAGTGCACCTACACTAGTGC |
| | CACAAGAGCACTATGTTAGAATTACTGGCTTATACCCAACACTCAATATCTCAGATGAGTTTTCTAG |
| | CAATGTTGCAAATTATCAAAAGGTTGGTATGCAAAAGTATTCTACACTCCAGGGACCACCTGGTACT |
| | GGTAAGAGTCATTTTGCTATTGGCCTAGCTCTCTACTACCCTTCTGCTCGCATAGTGTATACAGCTT |
| | GCTCTCATGCCGCTGTTGATGCACTATGTGAGAAGGCATTAAAATATTTGCCTATAGATAAATGTAG |
| | TAGAATTATACCTGCACGTGCTCGTGTAGATTGTTTTGATAAATTCAAAGTGAATTCAACATTAGAA |
| | CAGTATGTCTTTTGTACTGTAAATGCATTGCCTGAGACGACAGCAGATATAGTTGTCTTTGATGAAA |
| | TTTCAATGGCCACAAATTATGATTTGAGTGTTGTCAATGCCAGATTACGTGCTAAGCACTATGTGTA |
| | CATTGGCGACCCTGCTCAATTACCTGCACCACGCACATTGCTAACTAAGGGCACACTAGAACCAGAA |
| | TATTTCAATTCAGTGTGTAGACTTATGAAAACTATAGGTCCAGACATGTTCCTCGGAACTTGTCGGC |
| | GTTGTCCTGCTGAAATTGTTGACACTGTGAGTGCTTTGGTTTATGATAATAAGCTTAAAGCACATAA |
| | AGACAAATCAGCTCAATGCTTTAAAATGTTTTATAAGGGTGTTATCACGCATGATGTTTCATCTGCA |
| | ATTAACAGGCCACAAATAGGCGTGGTAAGAGAATTCCTTACACGTAACCCTGCTTGGAGAAAAGCTG |
| | TCTTTATTTCACCTTATAATTCACAGAATGCTGTAGCCTCAAAGATTTTGGGACTACCAACTCAAAC |
| | TGTTGATTCATCACAGGGCTCAGAATATGACTATGTCATATTCACTCAAACCACTGAAACAGCTCAC |
| | TCTTGTAATGTAAACAGATTTAATGTTGCTATTACCAGAGCAAAAGTAGGCATACTTTGCATAATGT |
| | CTGATAGAGACCTTTATGACAAGTTGCAATTTACAAGTCTTGAAATTCCACGTAGGAATGTGGCAAC |
| | TTTACAAGCTGAAAATGTAACAGGACTCTTTAAAGATTGTAGTAAGGTAATCACTGGGTTACATCCT |
| | ACACAGGCACCTACACACCTCAGTGTTGACACTAAATTCAAAACTGAAGGTTTATGTGTTGACATAC |
| | CTGGCATACCTAAGGACATGACCTATAGAAGACTCATCTCTATGATGGGTTTTAAAATGAATTATCA |
| | AGTTAATGGTTACCCTAACATGTTTATCACCCGCGAAGAAGCTATAAGACATGTACGTGCATGGATT |
| | GGCTTCGATGTCGAGGGGTGTCATGCTACTAGAGAAGCTGTTGGTACCAATTTACCTTTACAGCTAG |
| | GTTTTTCTACAGGTGTTAACCTAGTTGCTGTACCTACAGGTTATGTTGATACACCTAATAATACAGA |
| | TTTTTCCAGAGTTAGTGCTAAACCACCGCCTGGAGATCAATTTAAACACCTCATACCACTTATGTAC |
| | AAAGGACTTCCTTGGAATGTAGTGCGTATAAAGATTGTACAAATGTTAAGTGACACACTTAAAAATC |
| | TCTCTGACAGAGTCGTATTTGTCTTATGGGCACATGGCTTTGAGTTGACATCTATGAAGTATTTTGT |
| | GAAAATAGGACCTGAGCGCACCTGTTGTCTATGTGATAGACGTGCCACATGCTTTTCCACTGCTTCA |
| | GACACTTATGCCTGTTGGCATCATTCTATTGGATTTGATTACGTCTATAATCCGTTTATGATTGATG |
| | TTCAACAATGGGGTTTTACAGGTAACCTACAAAGCAACCATGATCTGTATTGTCAAGTCCATGGTAA |
| | TGCACATGTAGCTAGTTGTGATGCAATCATGACTAGGTGTCTAGCTGTCCACGAGTGCTTTGTTAAG |
| | CGTGTTGACTGGACTATTGAATATCCTATAATTGGTGATGAGCTGAAGATTAATGCGGCTTGTAGAA |
| | AGGTTCAACACATGGTTGTTAAAGCTGCATTATTAGCAGACAAATTCCCAGTTCTTCACGACATTGG |
| | TAACCCTAAAGCTATTAAGTGTGTACCTCAAGCTGATGTAGAATGGAAGTTCTATGATGCACAGCCT |
| | TGTAGTGACAAAGCTTATAAAATAGAAGAATTATTCTATTCTTATGCCACACATTCTGACAAATTCA |
| | CAGATGGTGTATGCCTATTTTGGAATTGCAATGTCGATAGATATCCTGCTAATTCCATTGTTTGTAG |
| | ATTTGACACTAGAGTGCTATCTAACCTTAACTTGCCTGGTTGTGATGGTGGCAGTTTGTATGTAAAT |
| | AAACATGCATTCCACACACCAGCTTTTGATAAAAGTGCTTTTGTTAATTTAAAACAATTACCATTTT |
| | TCTATTACTCTGACAGTCCATGTGAGTCTCATGGAAAACAAGTAGTGTCAGATATAGATTATGTACC |
| | ACTAAAGTCTGCTACGTGTATAACACGTTGCAATTTAGGTGGTGCTGTCTGTAGACATCATGCTAAT |
| | GAGTACAGATTGTATCTCGATGCTTATAACATGATGATCTCAGCTGGCTTTAGCTTGTGGGTTTACA |
| | AACAATTTGATACTTATAACCTCTGGAACACTTTTACAAGACTTCAGAGTTTAGAAAATGTGGCTTT |
| | TAATGTTGTAAATAAGGGACACTTTGATGGACAACAGGGTGAAGTACCAGTTTCTATCATTAATAAC |
| | ACTGTTTACACAAAAGTTGATGGTGTTGATGTAGAATTGTTTGAAAATAAAACAACATTACCTGTTA |
| | ATGTAGCATTTGAGCTTTGGGCTAAGCGCAACATTAAACCAGTMCCAGAGGTGAAAATACTCAATAA |
| | TTTGGGTGTGGACATTGCTGCTAATACTGTGATCTGGGACTACAAAAGAGATGCTCCAGCACATATA |
| | TCTACTATTGGTGTTTGTTCTATGACTGACATAGCCAAGAAACCAACTGAAACGATTTGTGCACCAC |
| | TCACTGTCTTTTTTGATGGTAGAGTTGATGGTCAAGTAGACTTATTTAGAAATGCCCGTAATGGTGT |
| | TCTTATTACAGAAGGTAGTGTTAAAGGTTTACAACCATCTGTAGGTCCCAAACAAGCTAGTCTTAAT |
| | GGAGTCACATTAATTGGAGAAGCCGTAAAAACACAGTTCAATTATTATAAGAAAGTTGATGGTGTTG |
| | TCCAACAATTACCTGAAACTTACTTTACTCAGAGTAGAAATTTACAAGAATTTAAACCCAGGAGTCA |
| | AATGGAAATTGATTTCTTAGAATTAGCTATGGATGAATTCATTGAACGGTATAAATTAGAAGGCTAT |
| | GCCTTCGAACATATCGTTTATGGAGATTTTAGTCATAGTCAGTTAGGTGGTTTACATCTACTGATTG |
| | GACTAGCTAAACGTTTTAAGGAATCACCTTTTGAATTAGAAGATTTTATTCCTATGGACAGTACAGT |
| | TAAAAACTATTTCATAACAGATGCGCAAACAGGTTCATCTAAGTGTGTGTGTTCTGTTATTGATTTA |
| | TTACTTGATGATTTTGTTGAAATAATAAAATCCCAAGATTTATCTGTAGTTTCTAAGGTTGTCAAAG |
| | TGACTATTGACTATACAGAAATTTCATTTATGCTTTGGTGTAAAGATGGCCATGTAGAAACATTTTA |
| | CCCAAAATTACAATCTAGTCAAGCGTGGCAACCGGGTGTTGCTATGCCTAATCTTTACAAAATGCAA |
| | AGAATGCTATTAGAAAAGTGTGACCTTCAAAATTATGGTGATAGTGCAACATTACCTAAAGGCATAA |
| | TGATGAATGTCGCAAAATATACTCAACTGTGTCAATATTTAAACACATTAACATTAGCTGTACCCTA |
| | TAATATGAGAGTTATACATTTTGGTGCTGGTTCTGATAAAGGAGTTGCACCAGGTACAGCTGTTTTA |
| | AGACAGTGGTTGCCTACGGGTACGCTGCTTGTCGATTCAGATCTTAATGACTTTGTCTCTGATGCAG |
| | ATTCAACTTTGATTGGTGATTGTGCAACTGTACATACAGCTAATAAATGGGATCTCATTATTAGTGA |
| | TATGTACGACCCTAAGACTAAAAATGTTACAAAAGAAAATGACTCTAAAGAGGGTTTTTTCACTTAC |
| | ATTTGTGGGTTTATACAACAAAAGCTAGCTCTTGGAGGTTCCGTGGCTATAAAGATAACAGAACATT |
| | CTTGGAATGCTGATCTTTATAAGCTCATGGGACACTTCGCATGGTGGACAGCCTTTGTTACTAATGT |
| | GAATGCGTCATCATCTGAAGCATTTTTAATTGGATGTAATTATCTTGGCAAACCACGCGAACAAATA |
| | GATGGTTATGTCATGCATGCAAATTACATATTTTGGAGGAATACAAATCCAATTCAGTTGTCTTCCT |
| | ATTCTTTATTTGACATGAGTAAATTTCCCCTTAAATTAAGGGGTACTGCTGTTATGTCTTTAAAAGA |
| | AGGTCAAATCAATGATATGATTTTATCTCTTCTTAGTAAAGGTAGACTTATAATTAGAGAAAACAAC |
| | AGAGTTGTTATTTCTAGTGATGTTCTTGTTAACAACTAAACGAACAATGTTTGTTTTTCTTGTTTTA |
| | TTGCCACTAGTCTCTAGTCAGTGTGTTAATTTTACAAACAGAACTCAATTACCCTCTGCATACACTA |
| | ATTCTTTCACACGTGGTGTTTATTACCCTGACAAAGTTTTCAGATCCTCAGTTTTACATTCAACTCA |
| | GGACTTGTTCTTACCTTTCTTTTCCAATGTTACTTGGTTCCATGCTATACATGTCTCTGGGACCAAT |
| | GGTACTAAGAGGTTTGATAACCCTGTCCTACCATTTAATGATGGTGTTTATTTTGCTTCCACTGAGA |
| | AGTCTAACATAATAAGAGGCTGGATTTTTGGTACTACTTTAGATTCGAAGACCCAGTCCCTACTTAT |
| | TGTTAATAACGCTACTAATGTTGTTATTAAAGTCTGTGAATTTCAATTTTGTAATTATCCATTTTTG |
| | GGTGTTTATTACCACAAAAACAACAAAAGTTGGATGGAAAGTGAGTTCAGAGTTTATTCTAGTGCGA |
| | ATAATTGCACTTTTGAATATGTCTCTCAGCCTTTTCTTATGGACCTTGAAGGAAAACAGGGTAATTT |
| | CAAAAATCTTAGTGAATTTGTGTTTAAGAATATTGATGGTTATTTTAAAATATATTCTAAGCACACG |
| | CCTATTAATTTAGTGCGTGATCTCCCTCAGGGTTTTTCGGCTTTAGAACCATTGGTAGATTTGCCAA |
| | TAGGTATTAACATCACTAGGTTTCAAACTTTACTTGCTTTACATAGAAGTTATTTGACTCCTGGTGA |
| | TTCTTCTTCAGGTTGGACAGCTGGTGCTGCAGCTTATTATGTGGGTTATCTTCAACCTAGGACTTTT |
| | CTATTAAAATATAATGAAAATGGAACCATTACAGATGCTGTAGACTGTGCACTTGACCCTCTCTCAG |
| | AAACAAAGTGTACGTTGAAATCCTTCACTGTAGAAAAAGGAATCTATCAAACTTCTAACTTTAGAGT |
| | CCAACCAACAGAATCTATTGTTAGATTTCCTAATATTACAAACTTGTGCCCTTTTGGTGAAGTTTTT |
| | AACGCCACCAGATTTGCATCTGTTTATGCTTGGAACAGGAAGAGAATCAGCAACTGTGTTGCTGATT |
| | ATTCTGTCCTATATAATTCCGCATCATTTTCCACTTTTAAGTGTTATGGAGTGTCTCCTACTAAATT |
| | AAATGATCTCTGCTTTACTAATGTCTATGCAGATTCATTTGTAATTAGAGGTGATGAAGTCAGACAA |
| | ATCGCTCCAGGGCAAACTGGAACGATTGCTGATTATAATTATAAATTACCAGATGATTTTACAGGCT |
| | GCGTTATAGCTTGGAATTCTAACAATCTTGATTCTAAGGTTGGTGGTAATTATAATTACCTGTATAG |
| | ATTGTTTAGGAAGTCTAATCTCAAACCTTTTGAGAGAGATATTTCAACTGAAATCTATCAGGCCGGT |
| | AGCACACCTTGTAATGGTGTTAAAGGTTTTAATTGTTACTTTCCTTTACAATCATATGGTTTCCAAC |
| | CCACTTATGGTGTTGGTTACCAACCATACAGAGTAGTAGTACTTTCTTTTGAACTTCTACATGCACC |
| | AGCAACTGTTTGTGGACCTAAAAAGTCTACTAATTTGGTTAAAAACAAATGTGTCAATTTCAACTTC |
| | AATGGTTTAACAGGCACAGGTGTTCTTACTGAGTCTAACAAAAAGTTTCTGCCTTTCCAACAATTTG |
| | GCAGAGACATTGCTGACACTACTGATGCTGTCCGTGATCCACAGACACTTGAGATTCTTGACATTAC |
| | ACCATGTTCTTTTGGTGGTGTCAGTGTTATAACACCAGGAACAAATACTTCTAACCAGGTTGCTGTT |
| | CTTTATCAGGGTGTTAACTGCACAGAAGTCCCTGTTGCTATTCATGCAGATCAACTTACTCCTACTT |
| | GGCGTGTTTATTCTACAGGTTCTAATGTTTTTCAAACACGTGCAGGCTGTTTAATAGGGGCTGAATA |
| | TGTCAACAACTCATATGAGTGTGACATACCCATTGGTGCAGGTATATGCGCTAGTTATCAGACTCAG |
| | ACTAATTCTCCTCGGCGGGCACGTAGTGTAGCTAGTCAATCCATCATTGCCTACACTATGTCACTTG |
| | GTGCAGAAAATTCAGTTGCTTACTCTAATAACTCTATTGCCATACCCACAAATTTTACTATTAGTGT |
| | TAGCACAGAAATTCTACCAGTGTCTATGACCAAGACATCAGTAGATTGTACAATGTACATTTGTGGT |
| | GATTCAACTGAATGCAGCAATCTTTTGTTGCAATATGGCAGTTTTTGTACACAATTAAACCGTGCTT |
| | TAACTGGAATAGCTGTTGAACAAGACAAAAACACCCAAGAAGTTTTTGCACAAGTCAAACAAATTTA |
| | CAAAACACCACCAATTAAAGATTTTGGTGGTTTTAATTTTTCACAAATATTAGCAGATCCATCAAAA |
| | CCAAGCAAGAGGTCATTTATTGAAGATCTACTTTTCAACAAAGTGACACTTGCAGATGCTGGCTTCA |
| | TCAAACAATATGGTGATTGCCTTGGTGATATTGCTGCTAGAGACCTCATTTGTGCACAAAAGTTTAA |
| | CGGCCTTACTGTTTTGCCACCTTTGCTCACAGATGAAATGATTGCTCAATACACTTCTGCACTGTTA |
| | GCGGGTACAATCACTTCTGGTTGGACCTTTGGTGCAGGTGCTGCATTACAAATACCATTTGCTATGC |
| | AAATGGCTTATAGGTTTAATGGTATTGGAGTTACACAGAATGTTCTCTATGAGAACCAAAAATTGAT |
| | TGCCAACCAATTTAATAGTGCTATTGGCAAAATTCAAGACTCACTTTCTTCCACAGCAAGTGCACTT |
| | GGAAAACTTCAAGATGTGGTCAACCAAAATGCACAAGCTTTAAACACGCTTGTTAAACAACTTAGCT |
| | CCAATTTTGGTGCAATTTCAAGTGTTTTAAATGATATCCTTTCACGTCTTGACAAAGTTGAGGCTGA |
| | AGTGCAAATTGATAGGTTGATCACAGGCAGACTTCAAAGTTTGCAGACATATGTGACTCAACAATTA |
| | ATTAGAGCTGCAGAAATCAGAGCTTCTGCTAATCTTGCTGCTATTAAAATGTCAGAGTGTGTACTTG |
| | GACAATCAAAAAGAGTTGATTTTTGTGGAAAGGGCTATCATCTTATGTCCTTCCCTCAGTCAGCACC |
| | TCATGGTGTAGTCTTCTTGCATGTGACTTATGTCCCTGCACAAGAAAAGAACTTCACAACTGCTCCT |
| | GCCATTTGTCATGATGGAAAAGCACACTTTCCTCGTGAAGGTGTCTTTGTTTCAAATGGCACACACT |
| | GGTTTGTAACACAAAGGAATTTTTATGAACCACAAATCATTACTACAGACAACACATTTGTGTCTGG |
| | TAACTGTGATGTTGTAATAGGAATTGTCAACAACACAGTTTATGATCCTTTGCAACCTGAATTAGAC |
| | TCATTCAAGGAGGAGTTAGATAAATATTTTAAGAATCATACATCACCAGATGTTGATTTAGGTGACA |
| | TCTCTGGCATTAATGCTTCATTTGTAAACATTCAAAAAGAAATTGACCGCCTCAATGAGGTTGCCAA |
| | GAATTTAAATGAATCTCTCATCGATCTCCAAGAACTTGGAAAGTATGAGCAGTATATAAAATGGCCA |
| | TGGTACATTTGGCTAGGTTTTATAGCTGGCTTGATTGCCATAGTAATGGTGACAATTATGCTTTGCT |
| | GTATGACCAGTTGCTGTAGTTGTCTCAAGGGCTGTTGTTCTTGTGGATCCTGCTGCAAATTTGATGA |
| | AGACGACTCTGAGCCAGTGCTCAAAGGAGTCAAATTACATTACACATAAACGAACTTATGGATTTGT |
| | TTATGAGAATCTTCACAATTGGAACTGTAACTTTGAAGCAAGGTGAAATCAAGGATGCTACTCCTTC |
| | AGATTTTGTTCGCGCTACTGCAACGATACCGATACAAGCCTCACTCCCTTTCGGATGGCTTATTGTT |
| | GGCGTTGCACTTCTTGCTGTTTTTCAGAGCGCTTCCAAAATCATAACCCTCAAAAAGAGATGGCAAC |
| | TAGCACTCTCCAAGGGTGTTCACTTTGTTTGCAACTTGCTGTTGTTGTTTGTAACAGTTTACTCACA |
| | CCTTTTGCTCGTTGCTGCTGGCCTTGAAGCCCCTTTTCTCTATCTTTATGCTTTAGTCTACTTCTTG |
| | CAGAGTATAAACTTTGTAAGAATAATAATGAGGCTTTGGCTTTGCTGGAAATGCCGTTCCAAAAACC |
| | CATTACTTTATGATGCCAACTATTTTCTTTGCTGGCATACTAATTGTTACGACTATTGTATACCTTA |
| | CAATAGTGTAACTTCTTCAATTGTCATTACTTCAGGTGATGGCACAACAAGTCCTATTTCTGAACAT |
| | GACTACCAGATTGGTGGTTATACTGAAAAATGGGAATCTGGAGTAAAAGACTGTGTTGTATTACACA |
| | GTTACTTTACTTCAGACTATTACCAGCTGTACTCAACTCAATTGAGTACAGACACTGGTGTTGAACA |
| | TGTTACCTTCTTCATCTACAATAAAATTGTTGATGAGCCTGAAGAACATGTCCAAATTCACACAATC |
| | GACGGTTCACCCGGAGTTGTTAATCCAGTAATGGAACCAATTTATGATGAACCGACGACGACTACTA |
| | GCGTGCCTTTGTAAGCACAAGCTGATGAGTACGAACTTATGTACTCATTCGTTTCGGAAGAGACAGG |
| | TACGTTAATAGTTAATAGCGTACTTCTTTTTCTTGCTTTCGTGGTATTCTTGCTAGTTACACTAGCC |
| | ATCCTTACTGCGCTTCGATTGTGTGCGTACTGCTGCAATATTGTTAACGTGAGTCTTGTAAAACCTT |
| | CTTTTTACGTTTACTCTCGTGTTAAAAATCTGAATTCTTCTAGAGTTCCTGATCTTCTGGTCTAAAC |
| | GAACTAAATATTATATTAGTTTTTCTGTTTGGAACTTTAATTTTAGCCATGGCAGATTCCAACGGTA |
| | CTATTACCGTTGAAGAGCTTAAAAAGCTCCTTGAACAATGGAACCTAGTAATAGGTTTCCTATTCCT |
| | TACATGGATTTGTCTTCTACAATTTGCCTATGCCAACAGGAATAGGTTTTTGTATATAATTAAGTTA |
| | ATTTTCCTCTGGCTGTTATGGCCAGTAACTTTAGCTTGTTTTGTGCTTGCTGCTGTTTACAGAATAA |
| | ATTGGATCACCGGTGGAATTGCTATCGCAATGGCTTGTCTTGTAGGCTTGATGTGGCTCAGCTACTT |
| | CATTGCTTCTTTCAGACTGTTTGCGCGTACGCGTTCCATGTGGTCATTCAATCCAGAAACTAACATT |
| | CTTCTCAACGTGCCACTCCATGGCACTATTCTGACCAGACCGCTTCTAGAAAGTGAACTCGTAATCG |
| | GAGCTGTGATCCTTCGTGGACATCTTCGTATTGCTGGACACCATCTAGGACGCTGTGACATCAAGGA |
| | CCTGCCTAAAGAAATCACTGTTGCTACATCACGAACGCTTTCTTATTACAAATTGGGAGCTTCGCAG |
| | CGTGTAGCAGGTGACTCAGGTTTTGCTGCATACAGTCGCTACAGGATTGGCAACTATAAATTAAACA |
| | CAGACCATTCCAGTAGCAGTGACAATATTGCTTTGCTTGTACAGTAAGTGACAACAGATGTTTCATC |
| | TCGTTGACTTTCAGGTTACTATAGCAGAGATATTACTAATTATTATGAGGACTTTTAAAGTTTCCAT |
| | TTGGAATCTTGATTACATCATAAACCTCATAATTAAAAATTTATCTAAGTCACTAACTGAGAATAAA |
| | TATTCTCAATTAGATGAAGAGCAACCAATGGAGATTGATTAAACGAACATGAAAATTATTCTTTTCT |
| | TGGCACTGATAACACTCGCTACTTGTGAGCTTTATCACTACCAAGAGTGTGTTAGAGGTACAACAGT |
| | ACTTTTAAAAGAACCTTGCTCTTCTGGAACATACGAGGGCAATTCACCATTTCATCCTCTAGCTGAT |
| | AACAAATTTGCACTGACTTGCTTTAGCACTCAATTTGCTTTTGCTTGTCCTGACGGCGTAAAACACG |
| | TCTATCAGTTACGTGCCAGATCAGTTTCACCTAAACTGTTCATCAGACAAGAGGAAGTTCAAGAACT |
| | TTACTCTCCAATTTTTCTTATTGTTGCGGCAATAGTGTTTATAACACTTTGCTTCACACTCAAAAGA |
| | AAGACAGAATGATTGAACTTTCATTAATTGACTTCTATTTGTGCTTTTTAGCCTTTCTGCTATTCCT |
| | TGTTTTAATTATGCTTATTATCTTTTGGTTCTCACTTGAACTGCAAGATCATAATGAAACTTGTCAC |
| | GCCTAAACGAACATGAAATTTCTTGTTTTCTTAGGAATCATCACAACTGTAGCTGCATTTCACCAAG |
| | AATGTAGTTTACAGTCATGTACTCAACATCAACCATATGTAGTTGATGACCCGTGTCCTATTCACTT |
| | CTATTCTAAATGGTATATTAGAGTAGGAGCTAGAAAATCAGCACCTTTAATTGAATTGTGCGTGGAT |
| | GAGGCTGGTTCTAAATCACCCATTCAGTACATCGATATCGGTAATTATACAGTTTCCTGTTTACCTT |
| | TTACAATTAATTGCCAGAAACCTAAATTGGGTAGTCTTGTAGTGCGTTGTTCGTTCTATGAAGACTT |
| | TTTAGAGTATCATGACGTTCGTGTTGTTTTAGATTTCATCTAAACGAACAAACAAACTAAAATGTCT |
| | GATAATGGACCCCAAAATCAGCGAAATGCACCCCGCATTACGTTTGGTGGACCCTCAGATTCAACTG |
| | GCAGTAACCAGAATGGAGAACGCAGTGGGGCGCGATCAAAACAACGTCGGCCCCAAGGTTTACCCAA |
| | TAATACTGCGTCTTGGTTCACCGCTCTCACTCAACATGGCAAGGAAGACCTTAAATTCCCTCGAGGA |
| | CAAGGCGTTCCAATTAACACCAATAGCAGTCGAGATGACCAAATTGGCTACTACCGAAGAGCTACCA |
| | GACGAATTCGTGGTGGTGACGGTAAAATGAAAGATCTCAGTCCAAGATGGTATTTCTACTACCTAGG |
| | AACTGGGCCAGAAGCTGGACTTCCCTATGGTGCTAACAAAGACGGCATCATATGGGTTGCAACTGAG |
| | GGAGCCTTGAATACACCAAAAGATCACATTGGCACCCGCAATCCTGCTAACAATGCTGCAATCGTGC |
| | TACAACTTCCTCAAGGAACAACATTGCCAAAAGGCTTCTACGCTGAAGGGAGCAGAGGCGGCAGTCA |
| | AGCCTCTTCTCGTTCCTCATCACGTAGTCGCAACAGTTCAAGAAATTCAACTCCAGGCAGCTCTAAA |
| | CGAACTTCTCCTGCTAGAATGGCTGGCAATGGCGGTGATGCTGCTCTTGCTTTGCTGCTGCTTGACA |
| | GATTGAACCAGCTTGAGAGCAAAATGTCTGGTAAAGGCCAACAACAACAAGGCCAAACTGTCACTAA |
| | GAAATCTGCTGCTGAGGCTTCTAAGAAGCCTCGGCAAAAACGTACTGCCACTAAAGCATACAATGTA |
| | ACACAAGCTTTCGGCAGACGTGGTCCAGAACAAACCCAAGGAAATTTTGGGGACCAGGAACTAATCA |
| | GACAAGGAACTGATTACAAACATTGGCCGCAAATTGCACAATTTGCCCCCAGCGCTTCAGCGTTCTT |
| | CGGAATGTCGCGCATTGGCATGGAAGTCACACCTTCGGGAACGTGGTTGACCTACACAGGTGCCATC |
| | AAATTGGATGACAAAGATCCAAATTTCAAAGATCAAGTCATTTTGCTGAATAAGCATATTGACGCAT |
| | ACAAAACATTCCCACCAACAGAGCCTAAAAAGGACAAAAAGAAGAAGGCTGATGAAACTCAAGCCTT |
| | ACCGCAGAGACAGAAGAAACAGCAAACTGTGACTCTTCTTCCTGCTGCAGATTTGGATGATTTCTCC |
| | AAACAATTGCAACAATCCATGAGCAGTGCTGACTCAACTCAGGCCTAAACTCATGCAGACCACACAA |
| | GGCAGATGGGCTATATAAACGTTTTCGCTTTTCCGTTTACGATATATAGTCTACTCTTGTGCAGAAT |
| | GAATTCTCGTAACTACATAGCACAAGTAGATGTAGTTAACTTTAATCTCACATAGCAATCTTTAATC |
| | AGTGTGTAACATTAGGGAGGACTTGAAAGAGCCACCACATTTTCACCGAGGCCACGCGGAGTACGAT |
| | CGAGTGTACAGTGAACAATGCTAGGGAGAGCTGCCTATATGGAAGAGCCCTAATGTGTAAAATTAAT |
| | TTTAGTAGTGCTAACCCCATGTGATTTTAATAGCTTCTTAGGAG |
| 279 | GenBank Accession No. MN985325 (Severe acute respiratory syndrome |
| | coronavirus 2 isolate SARS-CoV-2/human/USA/WA-CDC-WA1/2020, complete |
| | genome) |
| | ATTAAAGGTTTATACCTTCCCAGGTAACAAACCAACCAACTTTCGATCTCTTGTAGATCTGTTCTCT |
| | AAACGAACTTTAAAATCTGTGTGGCTGTCACTCGGCTGCATGCTTAGTGCACTCACGCAGTATAATT |
| | AATAACTAATTACTGTCGTTGACAGGACACGAGTAACTCGTCTATCTTCTGCAGGCTGCTTACGGTT |
| | TCGTCCGTGTTGCAGCCGATCATCAGCACATCTAGGTTTCGTCCGGGTGTGACCGAAAGGTAAGATG |
| | GAGAGCCTTGTCCCTGGTTTCAACGAGAAAACACACGTCCAACTCAGTTTGCCTGTTTTACAGGTTC |
| | GCGACGTGCTCGTACGTGGCTTTGGAGACTCCGTGGAGGAGGTCTTATCAGAGGCACGTCAACATCT |
| | TAAAGATGGCACTTGTGGCTTAGTAGAAGTTGAAAAAGGCGTTTTGCCTCAACTTGAACAGCCCTAT |
| | GTGTTCATCAAACGTTCGGATGCTCGAACTGCACCTCATGGTCATGTTATGGTTGAGCTGGTAGCAG |
| | AACTCGAAGGCATTCAGTACGGTCGTAGTGGTGAGACACTTGGTGTCCTTGTCCCTCATGTGGGCGA |
| | AATACCAGTGGCTTACCGCAAGGTTCTTCTTCGTAAGAACGGTAATAAAGGAGCTGGTGGCCATAGT |
| | TACGGCGCCGATCTAAAGTCATTTGACTTAGGCGACGAGCTTGGCACTGATCCTTATGAAGATTTTC |
| | AAGAAAACTGGAACACTAAACATAGCAGTGGTGTTACCCGTGAACTCATGCGTGAGCTTAACGGAGG |
| | GGCATACACTCGCTATGTCGATAACAACTTCTGTGGCCCTGATGGCTACCCTCTTGAGTGCATTAAA |
| | GACCTTCTAGCACGTGCTGGTAAAGCTTCATGCACTTTGTCCGAACAACTGGACTTTATTGACACTA |
| | AGAGGGGTGTATACTGCTGCCGTGAACATGAGCATGAAATTGCTTGGTACACGGAACGTTCTGAAAA |
| | GAGCTATGAATTGCAGACACCTTTTGAAATTAAATTGGCAAAGAAATTTGACACCTTCAATGGGGAA |
| | TGTCCAAATTTTGTATTTCCCTTAAATTCCATAATCAAGACTATTCAACCAAGGGTTGAAAAGAAAA |
| | AGCTTGATGGCTTTATGGGTAGAATTCGATCTGTCTATCCAGTTGCGTCACCAAATGAATGCAACCA |
| | AATGTGCCTTTCAACTCTCATGAAGTGTGATCATTGTGGTGAAACTTCATGGCAGACGGGCGATTTT |
| | GTTAAAGCCACTTGCGAATTTTGTGGCACTGAGAATTTGACTAAAGAAGGTGCCACTACTTGTGGTT |
| | ACTTACCCCAAAATGCTGTTGTTAAAATTTATTGTCCAGCATGTCACAATTCAGAAGTAGGACCTGA |
| | GCATAGTCTTGCCGAATACCATAATGAATCTGGCTTGAAAACCATTCTTCGTAAGGGTGGTCGCACT |
| | ATTGCCTTTGGAGGCTGTGTGTTCTCTTATGTTGGTTGCCATAACAAGTGTGCCTATTGGGTTCCAC |
| | GTGCTAGCGCTAACATAGGTTGTAACCATACAGGTGTTGTTGGAGAAGGTTCCGAAGGTCTTAATGA |
| | CAACCTTCTTGAAATACTCCAAAAAGAGAAAGTCAACATCAATATTGTTGGTGACTTTAAACTTAAT |
| | GAAGAGATCGCCATTATTTTGGCATCTTTTTCTGCTTCCACAAGTGCTTTTGTGGAAACTGTGAAAG |
| | GTTTGGATTATAAAGCATTCAAACAAATTGTTGAATCCTGTGGTAATTTTAAAGTTACAAAAGGAAA |
| | AGCTAAAAAAGGTGCCTGGAATATTGGTGAACAGAAATCAATACTGAGTCCTCTTTATGCATTTGCA |
| | TCAGAGGCTGCTCGTGTTGTACGATCAATTTTCTCCCGCACTCTTGAAACTGCTCAAAATTCTGTGC |
| | GTGTTTTACAGAAGGCCGCTATAACAATACTAGATGGAATTTCACAGTATTCACTGAGACTCATTGA |
| | TGCTATGATGTTCACATCTGATTTGGCTACTAACAATCTAGTTGTAATGGCCTACATTACAGGTGGT |
| | GTTGTTCAGTTGACTTCGCAGTGGCTAACTAACATCTTTGGCACTGTTTATGAAAAACTCAAACCCG |
| | TCCTTGATTGGCTTGAAGAGAAGTTTAAGGAAGGTGTAGAGTTTCTTAGAGACGGTTGGGAAATTGT |
| | TAAATTTATCTCAACCTGTGCTTGTGAAATTGTCGGTGGACAAATTGTCACCTGTGCAAAGGAAATT |
| | AAGGAGAGTGTTCAGACATTCTTTAAGCTTGTAAATAAATTTTTGGCTTTGTGTGCTGACTCTATCA |
| | TTATTGGTGGAGCTAAACTTAAAGCCTTGAATTTAGGTGAAACATTTGTCACGCACTCAAAGGGATT |
| | GTACAGAAAGTGTGTTAAATCCAGAGAAGAAACTGGCCTACTCATGCCTCTAAAAGCCCCAAAAGAA |
| | ATTATCTTCTTAGAGGGAGAAACACTTCCCACAGAAGTGTTAACAGAGGAAGTTGTCTTGAAAACTG |
| | GTGATTTACAACCATTAGAACAACCTACTAGTGAAGCTGTTGAAGCTCCATTGGTTGGTACACCAGT |
| | TTGTATTAACGGGCTTATGTTGCTCGAAATCAAAGACACAGAAAAGTACTGTGCCCTTGCACCTAAT |
| | ATGATGGTAACAAACAATACCTTCACACTCAAAGGCGGTGCACCAACAAAGGTTACTTTTGGTGATG |
| | ACACTGTGATAGAAGTGCAAGGTTACAAGAGTGTGAATATCACTTTTGAACTTGATGAAAGGATTGA |
| | TAAAGTACTTAATGAGAAGTGCTCTGCCTATACAGTTGAACTCGGTACAGAAGTAAATGAGTTCGCC |
| | TGTGTTGTGGCAGATGCTGTCATAAAAACTTTGCAACCAGTATCTGAATTACTTACACCACTGGGCA |
| | TTGATTTAGATGAGTGGAGTATGGCTACATACTACTTATTTGATGAGTCTGGTGAGTTTAAATTGGC |
| | TTCACATATGTATTGTTCTTTCTACCCTCCAGATGAGGATGAAGAAGAAGGTGATTGTGAAGAAGAA |
| | GAGTTTGAGCCATCAACTCAATATGAGTATGGTACTGAAGATGATTACCAAGGTAAACCTTTGGAAT |
| | TTGGTGCCACTTCTGCTGCTCTTCAACCTGAAGAAGAGCAAGAAGAAGATTGGTTAGATGATGATAG |
| | TCAACAAACTGTTGGTCAACAAGACGGCAGTGAGGACAATCAGACAACTACTATTCAAACAATTGTT |
| | GAGGTTCAACCTCAATTAGAGATGGAACTTACACCAGTTGTTCAGACTATTGAAGTGAATAGTTTTA |
| | GTGGTTATTTAAAACTTACTGACAATGTATACATTAAAAATGCAGACATTGTGGAAGAAGCTAAAAA |
| | GGTAAAACCAACAGTGGTTGTTAATGCAGCCAATGTTTACCTTAAACATGGAGGAGGTGTTGCAGGA |
| | GCCTTAAATAAGGCTACTAACAATGCCATGCAAGTTGAATCTGATGATTACATAGCTACTAATGGAC |
| | CACTTAAAGTGGGTGGTAGTTGTGTTTTAAGCGGACACAATCTTGCTAAACACTGTCTTCATGTTGT |
| | CGGCCCAAATGTTAACAAAGGTGAAGACATTCAACTTCTTAAGAGTGCTTATGAAAATTTTAATCAG |
| | CACGAAGTTCTACTTGCACCATTATTATCAGCTGGTATTTTTGGTGCTGACCCTATACATTCTTTAA |
| | GAGTTTGTGTAGATACTGTTCGCACAAATGTCTACTTAGCTGTCTTTGATAAAAATCTCTATGACAA |
| | ACTTGTTTCAAGCTTTTTGGAAATGAAGAGTGAAAAGCAAGTTGAACAAAAGATCGCTGAGATTCCT |
| | AAAGAGGAAGTTAAGCCATTTATAACTGAAAGTAAACCTTCAGTTGAACAGAGAAAACAAGATGATA |
| | AGAAAATCAAAGCTTGTGTTGAAGAAGTTACAACAACTCTGGAAGAAACTAAGTTCCTCACAGAAAA |
| | CTTGTTACTTTATATTGACATTAATGGCAATCTTCATCCAGATTCTGCCACTCTTGTTAGTGACATT |
| | GACATCACTTTCTTAAAGAAAGATGCTCCATATATAGTGGGTGATGTTGTTCAAGAGGGTGTTTTAA |
| | CTGCTGTGGTTATACCTACTAAAAAGGCTGGTGGCACTACTGAAATGCTAGCGAAAGCTTTGAGAAA |
| | AGTGCCAACAGACAATTATATAACCACTTACCCGGGTCAGGGTTTAAATGGTTACACTGTAGAGGAG |
| | GCAAAGACAGTGCTTAAAAAGTGTAAAAGTGCCTTTTACATTCTACCATCTATTATCTCTAATGAGA |
| | AGCAAGAAATTCTTGGAACTGTTTCTTGGAATTTGCGAGAAATGCTTGCACATGCAGAAGAAACACG |
| | CAAATTAATGCCTGTCTGTGTGGAAACTAAAGCCATAGTTTCAACTATACAGCGTAAATATAAGGGT |
| | ATTAAAATACAAGAGGGTGTGGTTGATTATGGTGCTAGATTTTACTTTTACACCAGTAAAACAACTG |
| | TAGCGTCACTTATCAACACACTTAACGATCTAAATGAAACTCTTGTTACAATGCCACTTGGCTATGT |
| | AACACATGGCTTAAATTTGGAAGAAGCTGCTCGGTATATGAGATCTCTCAAAGTGCCAGCTACAGTT |
| | TCTGTTTCTTCACCTGATGCTGTTACAGCGTATAATGGTTATCTTACTTCTTCTTCTAAAACACCTG |
| | AAGAACATTTTATTGAAACCATCTCACTTGCTGGTTCCTATAAAGATTGGTCCTATTCTGGACAATC |
| | TACACAACTAGGTATAGAATTTCTTAAGAGAGGTGATAAAAGTGTATATTACACTAGTAATCCTACC |
| | ACATTCCACCTAGATGGTGAAGTTATCACCTTTGACAATCTTAAGACACTTCTTTCTTTGAGAGAAG |
| | TGAGGACTATTAAGGTGTTTACAACAGTAGACAACATTAACCTCCACACGCAAGTTGTGGACATGTC |
| | AATGACATATGGACAACAGTTTGGTCCAACTTATTTGGATGGAGCTGATGTTACTAAAATAAAACCT |
| | CATAATTCACATGAAGGTAAAACATTTTATGTTTTACCTAATGATGACACTCTACGTGTTGAGGCTT |
| | TTGAGTACTACCACACAACTGATCCTAGTTTTCTGGGTAGGTACATGTCAGCATTAAATCACACTAA |
| | AAAGTGGAAATACCCACAAGTTAATGGTTTAACTTCTATTAAATGGGCAGATAACAACTGTTATCTT |
| | GCCACTGCATTGTTAACACTCCAACAAATAGAGTTGAAGTTTAATCCACCTGCTCTACAAGATGCTT |
| | ATTACAGAGCAAGGGCTGGTGAAGCTGCTAACTTTTGTGCACTTATCTTAGCCTACTGTAATAAGAC |
| | AGTAGGTGAGTTAGGTGATGTTAGAGAAACAATGAGTTACTTGTTTCAACATGCCAATTTAGATTCT |
| | TGCAAAAGAGTCTTGAACGTGGTGTGTAAAACTTGTGGACAACAGCAGACAACCCTTAAGGGTGTAG |
| | AAGCTGTTATGTACATGGGCACACTTTCTTATGAACAATTTAAGAAAGGTGTTCAGATACCTTGTAC |
| | GTGTGGTAAACAAGCTACAAAATATCTAGTACAACAGGAGTCACCTTTTGTTATGATGTCAGCACCA |
| | CCTGCTCAGTATGAACTTAAGCATGGTACATTTACTTGTGCTAGTGAGTACACTGGTAATTACCAGT |
| | GTGGTCACTATAAACATATAACTTCTAAAGAAACTTTGTATTGCATAGACGGTGCTTTACTTACAAA |
| | GTCCTCAGAATACAAAGGTCCTATTACGGATGTTTTCTACAAAGAAAACAGTTACACAACAACCATA |
| | AAACCAGTTACTTATAAATTGGATGGTGTTGTTTGTACAGAAATTGACCCTAAGTTGGACAATTATT |
| | ATAAGAAAGACAATTCTTATTTCACAGAGCAACCAATTGATCTTGTACCAAACCAACCATATCCAAA |
| | CGCAAGCTTCGATAATTTTAAGTTTGTATGTGATAATATCAAATTTGCTGATGATTTAAACCAGTTA |
| | ACTGGTTATAAGAAACCTGCTTCAAGAGAGCTTAAAGTTACATTTTTCCCTGACTTAAATGGTGATG |
| | TGGTGGCTATTGATTATAAACACTACACACCCTCTTTTAAGAAAGGAGCTAAATTGTTACATAAACC |
| | TATTGTTTGGCATGTTAACAATGCAACTAATAAAGCCACGTATAAACCAAATACCTGGTGTATACGT |
| | TGTCTTTGGAGCACAAAACCAGTTGAAACATCAAATTCGTTTGATGTACTGAAGTCAGAGGACGCGC |
| | AGGGAATGGATAATCTTGCCTGCGAAGATCTAAAACCAGTCTCTGAAGAAGTAGTGGAAAATCCTAC |
| | CATACAGAAAGACGTTCTTGAGTGTAATGTGAAAACTACCGAAGTTGTAGGAGACATTATACTTAAA |
| | CCAGCAAATAATAGTTTAAAAATTACAGAAGAGGTTGGCCACACAGATCTAATGGCTGCTTATGTAG |
| | ACAATTCTAGTCTTACTATTAAGAAACCTAATGAATTATCTAGAGTATTAGGTTTGAAAACCCTTGC |
| | TACTCATGGTTTAGCTGCTGTTAATAGTGTCCCTTGGGATACTATAGCTAATTATGCTAAGCCTTTT |
| | CTTAACAAAGTTGTTAGTACAACTACTAACATAGTTACACGGTGTTTAAACCGTGTTTGTACTAATT |
| | ATATGCCTTATTTCTTTACTTTATTGCTACAATTGTGTACTTTTACTAGAAGTACAAATTCTAGAAT |
| | TAAAGCATCTATGCCGACTACTATAGCAAAGAATACTGTTAAGAGTGTCGGTAAATTTTGTCTAGAG |
| | GCTTCATTTAATTATTTGAAGTCACCTAATTTTTCTAAACTGATAAATATTATAATTTGGTTTTTAC |
| | TATTAAGTGTTTGCCTAGGTTCTTTAATCTACTCAACCGCTGCTTTAGGTGTTTTAATGTCTAATTT |
| | AGGCATGCCTTCTTACTGTACTGGTTACAGAGAAGGCTATTTGAACTCTACTAATGTCACTATTGCA |
| | ACCTACTGTACTGGTTCTATACCTTGTAGTGTTTGTCTTAGTGGTTTAGATTCTTTAGACACCTATC |
| | CTTCTTTAGAAACTATACAAATTACCATTTCATCTTTTAAATGGGATTTAACTGCTTTTGGCTTAGT |
| | TGCAGAGTGGTTTTTGGCATATATTCTTTTCACTAGGTTTTTCTATGTACTTGGATTGGCTGCAATC |
| | ATGCAATTGTTTTTCAGCTATTTTGCAGTACATTTTATTAGTAATTCTTGGCTTATGTGGTTAATAA |
| | TTAATCTTGTACAAATGGCCCCGATTTCAGCTATGGTTAGAATGTACATCTTCTTTGCATCATTTTA |
| | TTATGTATGGAAAAGTTATGTGCATGTTGTAGACGGTTGTAATTCATCAACTTGTATGATGTGTTAC |
| | AAACGTAATAGAGCAACAAGAGTCGAATGTACAACTATTGTTAATGGTGTTAGAAGGTCCTTTTATG |
| | TCTATGCTAATGGAGGTAAAGGCTTTTGCAAACTACACAATTGGAATTGTGTTAATTGTGATACATT |
| | CTGTGCTGGTAGTACATTTATTAGTGATGAAGTTGCGAGAGACTTGTCACTACAGTTTAAAAGACCA |
| | ATAAATCCTACTGACCAGTCTTCTTACATCGTTGATAGTGTTACAGTGAAGAATGGTTCCATCCATC |
| | TTTACTTTGATAAAGCTGGTCAAAAGACTTATGAAAGACATTCTCTCTCTCATTTTGTTAACTTAGA |
| | CAACCTGAGAGCTAATAACACTAAAGGTTCATTGCCTATTAATGTTATAGTTTTTGATGGTAAATCA |
| | AAATGTGAAGAATCATCTGCAAAATCAGCGTCTGTTTACTACAGTCAGCTTATGTGTCAACCTATAC |
| | TGTTACTAGATCAGGCATTAGTGTCTGATGTTGGTGATAGTGCGGAAGTTGCAGTTAAAATGTTTGA |
| | TGCTTACGTTAATACGTTTTCATCAACTTTTAACGTACCAATGGAAAAACTCAAAACACTAGTTGCA |
| | ACTGCAGAAGCTGAACTTGCAAAGAATGTGTCCTTAGACAATGTCTTATCTACTTTTATTTCAGCAG |
| | CTCGGCAAGGGTTTGTTGATTCAGATGTAGAAACTAAAGATGTTGTTGAATGTCTTAAATTGTCACA |
| | TCAATCTGACATAGAAGTTACTGGCGATAGTTGTAATAACTATATGCTCACCTATAACAAAGTTGAA |
| | AACATGACACCCCGTGACCTTGGTGCTTGTATTGACTGTAGTGCGCGTCATATTAATGCGCAGGTAG |
| | CAAAAAGTCACAACATTGCTTTGATATGGAACGTTAAAGATTTCATGTCATTGTCTGAACAACTACG |
| | AAAACAAATACGTAGTGCTGCTAAAAAGAATAACTTACCTTTTAAGTTGACATGTGCAACTACTAGA |
| | CAAGTTGTTAATGTTGTAACAACAAAGATAGCACTTAAGGGTGGTAAAATTGTTAATAATTGGTTGA |
| | AGCAGTTAATTAAAGTTACACTTGTGTTCCTTTTTGTTGCTGCTATTTTCTATTTAATAACACCTGT |
| | TCATGTCATGTCTAAACATACTGACTTTTCAAGTGAAATCATAGGATACAAGGCTATTGATGGTGGT |
| | GTCACTCGTGACATAGCATCTACAGATACTTGTTTTGCTAACAAACATGCTGATTTTGACACATGGT |
| | TTAGTCAGCGTGGTGGTAGTTATACTAATGACAAAGCTTGCCCATTGATTGCTGCAGTCATAACAAG |
| | AGAAGTGGGTTTTGTCGTGCCTGGTTTGCCTGGCACGATATTACGCACAACTAATGGTGACTTTTTG |
| | CATTTCTTACCTAGAGTTTTTAGTGCAGTTGGTAACATCTGTTACACACCATCAAAACTTATAGAGT |
| | ACACTGACTTTGCAACATCAGCTTGTGTTTTGGCTGCTGAATGTACAATTTTTAAAGATGCTTCTGG |
| | TAAGCCAGTACCATATTGTTATGATACCAATGTACTAGAAGGTTCTGTTGCTTATGAAAGTTTACGC |
| | CCTGACACACGTTATGTGCTCATGGATGGCTCTATTATTCAATTTCCTAACACCTACCTTGAAGGTT |
| | CTGTTAGAGTGGTAACAACTTTTGATTCTGAGTACTGTAGGCACGGCACTTGTGAAAGATCAGAAGC |
| | TGGTGTTTGTGTATCTACTAGTGGTAGATGGGTACTTAACAATGATTATTACAGATCTTTACCAGGA |
| | GTTTTCTGTGGTGTAGATGCTGTAAATTTACTTACTAATATGTTTACACCACTAATTCAACCTATTG |
| | GTGCTTTGGACATATCAGCATCTATAGTAGCTGGTGGTATTGTAGCTATCGTAGTAACATGCCTTGC |
| | CTACTATTTTATGAGGTTTAGAAGAGCTTTTGGTGAATACAGTCATGTAGTTGCCTTTAATACTTTA |
| | CTATTCCTTATGTCATTCACTGTACTCTGTTTAACACCAGTTTACTCATTCTTACCTGGTGTTTATT |
| | CTGTTATTTACTTGTACTTGACATTTTATCTTACTAATGATGTTTCTTTTTTAGCACATATTCAGTG |
| | GATGGTTATGTTCACACCTTTAGTACCTTTCTGGATAACAATTGCTTATATCATTTGTATTTCCACA |
| | AAGCATTTCTATTGGTTCTTTAGTAATTACCTAAAGAGACGTGTAGTCTTTAATGGTGTTTCCTTTA |
| | GTACTTTTGAAGAAGCTGCGCTGTGCACCTTTTTGTTAAATAAAGAAATGTATCTAAAGTTGCGTAG |
| | TGATGTGCTATTACCTCTTACGCAATATAATAGATACTTAGCTCTTTATAATAAGTACAAGTATTTT |
| | AGTGGAGCAATGGATACAACTAGCTACAGAGAAGCTGCTTGTTGTCATCTCGCAAAGGCTCTCAATG |
| | ACTTCAGTAACTCAGGTTCTGATGTTCTTTACCAACCACCACAAACCTCTATCACCTCAGCTGTTTT |
| | GCAGAGTGGTTTTAGAAAAATGGCATTCCCATCTGGTAAAGTTGAGGGTTGTATGGTACAAGTAACT |
| | TGTGGTACAACTACACTTAACGGTCTTTGGCTTGATGACGTAGTTTACTGTCCAAGACATGTGATCT |
| | GCACCTCTGAAGACATGCTTAACCCTAATTATGAAGATTTACTCATTCGTAAGTCTAATCATAATTT |
| | CTTGGTACAGGCTGGTAATGTTCAACTCAGGGTTATTGGACATTCTATGCAAAATTGTGTACTTAAG |
| | CTTAAGGTTGATACAGCCAATCCTAAGACACCTAAGTATAAGTTTGTTCGCATTCAACCAGGACAGA |
| | CTTTTTCAGTGTTAGCTTGTTACAATGGTTCACCATCTGGTGTTTACCAATGTGCTATGAGGCCCAA |
| | TTTCACTATTAAGGGTTCATTCCTTAATGGTTCATGTGGTAGTGTTGGTTTTAACATAGATTATGAC |
| | TGTGTCTCTTTTTGTTACATGCACCATATGGAATTACCAACTGGAGTTCATGCTGGCACAGACTTAG |
| | AAGGTAACTTTTATGGACCTTTTGTTGACAGGCAAACAGCACAAGCAGCTGGTACGGACACAACTAT |
| | TACAGTTAATGTTTTAGCTTGGTTGTACGCTGCTGTTATAAATGGAGACAGGTGGTTTCTCAATCGA |
| | TTTACCACAACTCTTAATGACTTTAACCTTGTGGCTATGAAGTACAATTATGAACCTCTAACACAAG |
| | ACCATGTTGACATACTAGGACCTCTTTCTGCTCAAACTGGAATTGCCGTTTTAGATATGTGTGCTTC |
| | ATTAAAAGAATTACTGCAAAATGGTATGAATGGACGTACCATATTGGGTAGTGCTTTATTAGAAGAT |
| | GAATTTACACCTTTTGATGTTGTTAGACAATGCTCAGGTGTTACTTTCCAAAGTGCAGTGAAAAGAA |
| | CAATCAAGGGTACACACCACTGGTTGTTACTCACAATTTTGACTTCACTTTTAGTTTTAGTCCAGAG |
| | TACTCAATGGTCTTTGTTCTTTTTTTTGTATGAAAATGCCTTTTTACCTTTTGCTATGGGTATTATT |
| | GCTATGTCTGCTTTTGCAATGATGTTTGTCAAACATAAGCATGCATTTCTCTGTTTGTTTTTGTTAC |
| | CTTCTCTTGCCACTGTAGCTTATTTTAATATGGTCTATATGCCTGCTAGTTGGGTGATGCGTATTAT |
| | GACATGGTTGGATATGGTTGATACTAGTTTGTCTGGTTTTAAGCTAAAAGACTGTGTTATGTATGCA |
| | TCAGCTGTAGTGTTACTAATCCTTATGACAGCAAGAACTGTGTATGATGATGGTGCTAGGAGAGTGT |
| | GGACACTTATGAATGTCTTGACACTCGTTTATAAAGTTTATTATGGTAATGCTTTAGATCAAGCCAT |
| | TTCCATGTGGGCTCTTATAATCTCTGTTACTTCTAACTACTCAGGTGTAGTTACAACTGTCATGTTT |
| | TTGGCCAGAGGTATTGTTTTTATGTGTGTTGAGTATTGCCCTATTTTCTTCATAACTGGTAATACAC |
| | TTCAGTGTATAATGCTAGTTTATTGTTTCTTAGGCTATTTTTGTACTTGTTACTTTGGCCTCTTTTG |
| | TTTACTCAACCGCTACTTTAGACTGACTCTTGGTGTTTATGATTACTTAGTTTCTACACAGGAGTTT |
| | AGATATATGAATTCACAGGGACTACTCCCACCCAAGAATAGCATAGATGCCTTCAAACTCAACATTA |
| | AATTGTTGGGTGTTGGTGGCAAACCTTGTATCAAAGTAGCCACTGTACAGTCTAAAATGTCAGATGT |
| | AAAGTGCACATCAGTAGTCTTACTCTCAGTTTTGCAACAACTCAGAGTAGAATCATCATCTAAATTG |
| | TGGGCTCAATGTGTCCAGTTACACAATGACATTCTCTTAGCTAAAGATACTACTGAAGCCTTTGAAA |
| | AAATGGTTTCACTACTTTCTGTTTTGCTTTCCATGCAGGGTGCTGTAGACATAAACAAGCTTTGTGA |
| | AGAAATGCTGGACAACAGGGCAACCTTACAAGCTATAGCCTCAGAGTTTAGTTCCCTTCCATCATAT |
| | GCAGCTTTTGCTACTGCTCAAGAAGCTTATGAGCAGGCTGTTGCTAATGGTGATTCTGAAGTTGTTC |
| | TTAAAAAGTTGAAGAAGTCTTTGAATGTGGCTAAATCTGAATTTGACCGTGATGCAGCCATGCAACG |
| | TAAGTTGGAAAAGATGGCTGATCAAGCTATGACCCAAATGTATAAACAGGCTAGATCTGAGGACAAG |
| | AGGGCAAAAGTTACTAGTGCTATGCAGACAATGCTTTTCACTATGCTTAGAAAGTTGGATAATGATG |
| | CACTCAACAACATTATCAACAATGCAAGAGATGGTTGTGTTCCCTTGAACATAATACCTCTTACAAC |
| | AGCAGCCAAACTAATGGTTGTCATACCAGACTATAACACATATAAAAATACGTGTGATGGTACAACA |
| | TTTACTTATGCATCAGCATTGTGGGAAATCCAACAGGTTGTAGATGCAGATAGTAAAATTGTTCAAC |
| | TTAGTGAAATTAGTATGGACAATTCACCTAATTTAGCATGGCCTCTTATTGTAACAGCTTTAAGGGC |
| | CAATTCTGCTGTCAAATTACAGAATAATGAGCTTAGTCCTGTTGCACTACGACAGATGTCTTGTGCT |
| | GCCGGTACTACACAAACTGCTTGCACTGATGACAATGCGTTAGCTTACTACAACACAACAAAGGGAG |
| | GTAGGTTTGTACTTGCACTGTTATCCGATTTACAGGATTTGAAATGGGCTAGATTCCCTAAGAGTGA |
| | TGGAACTGGTACTATCTATACAGAACTGGAACCACCTTGTAGGTTTGTTACAGACACACCTAAAGGT |
| | CCTAAAGTGAAGTATTTATACTTTATTAAAGGATTAAACAACCTAAATAGAGGTATGGTACTTGGTA |
| | GTTTAGCTGCCACAGTACGTCTACAAGCTGGTAATGCAACAGAAGTGCCTGCCAATTCAACTGTATT |
| | ATCTTTCTGTGCTTTTGCTGTAGATGCTGCTAAAGCTTACAAAGATTATCTAGCTAGTGGGGGACAA |
| | CCAATCACTAATTGTGTTAAGATGTTGTGTACACACACTGGTACTGGTCAGGCAATAACAGTTACAC |
| | CGGAAGCCAATATGGATCAAGAATCCTTTGGTGGTGCATCGTGTTGTCTGTACTGCCGTTGCCACAT |
| | AGATCATCCAAATCCTAAAGGATTTTGTGACTTAAAAGGTAAGTATGTACAAATACCTACAACTTGT |
| | GCTAATGACCCTGTGGGTTTTACACTTAAAAACACAGTCTGTACCGTCTGCGGTATGTGGAAAGGTT |
| | ATGGCTGTAGTTGTGATCAACTCCGCGAACCCATGCTTCAGTCAGCTGATGCACAATCGTTTTTAAA |
| | CGGGTTTGCGGTGTAAGTGCAGCCCGTCTTACACCGTGCGGCACAGGCACTAGTACTGATGTCGTAT |
| | ACAGGGCTTTTGACATCTACAATGATAAAGTAGCTGGTTTTGCTAAATTCCTAAAAACTAATTGTTG |
| | TCGCTTCCAAGAAAAGGACGAAGATGACAATTTAATTGATTCTTACTTTGTAGTTAAGAGACACACT |
| | TTCTCTAACTACCAACATGAAGAAACAATTTATAATTTACTTAAGGATTGTCCAGCTGTTGCTAAAC |
| | ATGACTTCTTTAAGTTTAGAATAGACGGTGACATGGTACCACATATATCACGTCAACGTCTTACTAA |
| | ATACACAATGGCAGACCTCGTCTATGCTTTAAGGCATTTTGATGAAGGTAATTGTGACACATTAAAA |
| | GAAATACTTGTCACATACAATTGTTGTGATGATGATTATTTCAATAAAAAGGACTGGTATGATTTTG |
| | TAGAAAACCCAGATATATTACGCGTATACGCCAACTTAGGTGAACGTGTACGCCAAGCTTTGTTAAA |
| | AACAGTACAATTCTGTGATGCCATGCGAAATGCTGGTATTGTTGGTGTACTGACATTAGATAATCAA |
| | GATCTCAATGGTAACTGGTATGATTTCGGTGATTTCATACAAACCACGCCAGGTAGTGGAGTTCCTG |
| | TTGTAGATTCTTATTATTCATTGTTAATGCCTATATTAACCTTGACCAGGGCTTTAACTGCAGAGTC |
| | ACATGTTGACACTGACTTAACAAAGCCTTACATTAAGTGGGATTTGTTAAAATATGACTTCACGGAA |
| | GAGAGGTTAAAACTCTTTGACCGTTATTTTAAATATTGGGATCAGACATACCACCCAAATTGTGTTA |
| | ACTGTTTGGATGACAGATGCATTCTGCATTGTGCAAACTTTAATGTTTTATTCTCTACAGTGTTCCC |
| | ACCTACAAGTTTTGGACCACTAGTGAGAAAAATATTTGTTGATGGTGTTCCATTTGTAGTTTCAACT |
| | GGATACCACTTCAGAGAGCTAGGTGTTGTACATAATCAGGATGTAAACTTACATAGCTCTAGACTTA |
| | GTTTTAAGGAATTACTTGTGTATGCTGCTGACCCTGCTATGCACGCTGCTTCTGGTAATCTATTACT |
| | AGATAAACGCACTACGTGCTTTTCAGTAGCTGCACTTACTAACAATGTTGCTTTTCAAACTGTCAAA |
| | CCCGGTAATTTTAACAAAGACTTCTATGACTTTGCTGTGTCTAAGGGTTTCTTTAAGGAAGGAAGTT |
| | CTGTTGAATTAAAACACTTCTTCTTTGCTCAGGATGGTAATGCTGCTATCAGCGATTATGACTACTA |
| | TCGTTATAATCTACCAACAATGTGTGATATCAGACAACTACTATTTGTAGTTGAAGTTGTTGATAAG |
| | TACTTTGATTGTTACGATGGTGGCTGTATTAATGCTAACCAAGTCATCGTCAACAACCTAGACAAAT |
| | CAGCTGGTTTTCCATTTAATAAATGGGGTAAGGCTAGACTTTATTATGATTCAATGAGTTATGAGGA |
| | TCAAGATGCACTTTTCGCATATACAAAACGTAATGTCATCCCTACTATAACTCAAATGAATCTTAAG |
| | TATGCCATTAGTGCAAAGAATAGAGCTCGCACCGTAGCTGGTGTCTCTATCTGTAGTACTATGACCA |
| | ATAGACAGTTTCATCAAAAATTATTGAAATCAATAGCCGCCACTAGAGGAGCTACTGTAGTAATTGG |
| | AACAAGCAAATTCTATGGTGGTTGGCACAACATGTTAAAAACTGTTTATAGTGATGTAGAAAACCCT |
| | CACCTTATGGGTTGGGATTATCCTAAATGTGATAGAGCCATGCCTAACATGCTTAGAATTATGGCCT |
| | CACTTGTTCTTGCTCGCAAACATACAACGTGTTGTAGCTTGTCACACCGTTTCTATAGATTAGCTAA |
| | TGAGTGTGCTCAAGTATTGAGTGAAATGGTCATGTGTGGCGGTTCACTATATGTTAAACCAGGTGGA |
| | ACCTCATCAGGAGATGCCACAACTGCTTATGCTAATAGTGTTTTTAACATTTGTCAAGCTGTCACGG |
| | CCAATGTTAATGCACTTTTATCTACTGATGGTAACAAAATTGCCGATAAGTATGTCCGCAATTTACA |
| | ACACAGACTTTATGAGTGTCTCTATAGAAATAGAGATGTTGACACAGACTTTGTGAATGAGTTTTAG |
| | GCATATTTGCGTAAACATTTCTCAATGATGATACTCTCTGACGATGCTGTTGTGTGTTTCAATAGCA |
| | CTTATGCATCTCAAGGTCTAGTGGCTAGCATAAAGAACTTTAAGTCAGTTCTTTATTATCAAAACAA |
| | TGTTTTTATGTCTGAAGCAAAATGTTGGACTGAGACTGACCTTACTAAAGGACCTCATGAATTTTGC |
| | TCTCAACATACAATGCTAGTTAAACAGGGTGATGATTATGTGTACCTTCCTTACCCAGATCCATCAA |
| | GAATCCTAGGGGCCGGCTGTTTTGTAGATGATATCGTAAAAACAGATGGTACACTTATGATTGAACG |
| | GTTCGTGTCTTTAGCTATAGATGCTTACCCACTTACTAAACATCCTAATCAGGAGTATGCTGATGTC |
| | TTTCATTTGTACTTACAATACATAAGAAAGCTAGATGATGAGTTAACAGGACACATGTTAGACATGT |
| | ATTCTGTTATGCTTACTAATGATAACACTTCAAGGTATTGGGAACCTGAGTTTTATGAGGCTATGTA |
| | CACACCGCATACAGTCTTACAGGCTGTTGGGGCTTGTGTTCTTTGCAATTCACAGACTTCATTAAGA |
| | TGTGGTGCTTGCATACGTAGACCATTCTTATGTTGTAAATGCTGTTACGACCATGTCATATCAACAT |
| | CACATAAATTAGTCTTGTCTGTTAATCCGTATGTTTGCAATGCTCCAGGTTGTGATGTCACAGATGT |
| | GACTCAACTTTACTTAGGAGGTATGAGCTATTATTGTAAATCACATAAACCACCCATTAGTTTTCCA |
| | TTGTGTGCTAATGGACAAGTTTTTGGTTTATATAAAAATACATGTGTTGGTAGCGATAATGTTACTG |
| | ACTTTAATGCAATTGCAACATGTGACTGGACAAATGCTGGTGATTACATTTTAGCTAACACCTGTAC |
| | TGAAAGACTCAAGCTTTTTGCAGCAGAAACGCTCAAAGCTACTGAGGAGACATTTAAACTGTCTTAT |
| | GGTATTGCTACTGTACGTGAAGTGCTGTCTGACAGAGAATTACATCTTTCATGGGAAGTTGGTAAAC |
| | CTAGACCACCACTTAACCGAAATTATGTCTTTACTGGTTATCGTGTAACTAAAAACAGTAAAGTACA |
| | AATAGGAGAGTACACCTTTGAAAAAGGTGACTATGGTGATGCTGTTGTTTACCGAGGTACAACAACT |
| | TACAAATTAAATGTTGGTGATTATTTTGTGCTGACATCACATACAGTAATGCCATTAAGTGCACCTA |
| | CACTAGTGCCACAAGAGCACTATGTTAGAATTACTGGCTTATACCCAACACTCAATATCTCAGATGA |
| | GTTTTCTAGCAATGTTGCAAATTATCAAAAGGTTGGTATGCAAAAGTATTCTACACTCCAGGGACCA |
| | CCTGGTACTGGTAAGAGTCATTTTGCTATTGGCCTAGCTCTCTACTACCCTTCTGCTCGCATAGTGT |
| | ATACAGCTTGCTCTCATGCCGCTGTTGATGCACTATGTGAGAAGGCATTAAAATATTTGCCTATAGA |
| | TAAATGTAGTAGAATTATACCTGCACGTGCTCGTGTAGAGTGTTTTGATAAATTCAAAGTGAATTCA |
| | ACATTAGAACAGTATGTCTTTTGTACTGTAAATGCATTGCCTGAGACGACAGCAGATATAGTTGTCT |
| | TTGATGAAATTTCAATGGCCACAAATTATGATTTGAGTGTTGTCAATGCCAGATTACGTGCTAAGCA |
| | CTATGTGTACATTGGCGACCCTGCTCAATTACCTGCACCACGCACATTGCTAACTAAGGGCACACTA |
| | GAACCAGAATATTTCAATTCAGTGTGTAGACTTATGAAAACTATAGGTCCAGACATGTTCCTCGGAA |
| | CTTGTCGGCGTTGTCCTGCTGAAATTGTTGACACTGTGAGTGCTTTGGTTTATGATAATAAGCTTAA |
| | AGCACATAAAGACAAATCAGCTCAATGCTTTAAAATGTTTTATAAGGGTGTTATCACGCATGATGTT |
| | TCATCTGCAATTAACAGGCCACAAATAGGCGTGGTAAGAGAATTCCTTACACGTAACCCTGCTTGGA |
| | GAAAAGCTGTCTTTATTTCACCTTATAATTCACAGAATGCTGTAGCCTCAAAGATTTTGGGACTACC |
| | AACTCAAACTGTTGATTCATCACAGGGCTCAGAATATGACTATGTCATATTCACTCAAACCACTGAA |
| | ACAGCTCACTCTTGTAATGTAAACAGATTTAATGTTGCTATTACCAGAGCAAAAGTAGGCATACTTT |
| | GCATAATGTCTGATAGAGACCTTTATGACAAGTTGCAATTTACAAGTCTTGAAATTCCACGTAGGAA |
| | TGTGGCAACTTTACAAGCTGAAAATGTAACAGGACTTTTTAAAGATTGTAGTAAGGTAATCACTGGG |
| | TTACATCCTACACAGGCACCTACACACCTCAGTGTTGACACTAAATTCAAAACTGAAGGTTTATGTG |
| | TTGACATACCTGGCATACCTAAGGACATGACCTATAGAAGACTCATCTCTATGATGGGTTTTAAAAT |
| | GAATTATCAAGTTAATGGTTACCCTAACATGTTTATCACCCGCGAAGAAGCTATAAGACATGTACGT |
| | GCATGGATTGGCTTCGATGTCGAGGGGTGTCATGCTACTAGAGAAGCTGTTGGTACCAATTTACCTT |
| | TACAGCTAGGTTTTTCTACAGGTGTTAACCTAGTTGCTGTACCTACAGGTTATGTTGATACACCTAA |
| | TAATACAGATTTTTCCAGAGTTAGTGCTAAACCACCGCCTGGAGATCAATTTAAACACCTCATACCA |
| | CTTATGTACAAAGGACTTCCTTGGAATGTAGTGCGTATAAAGATTGTACAAATGTTAAGTGACACAC |
| | TTAAAAATCTCTCTGACAGAGTCGTATTTGTCTTATGGGCACATGGCTTTGAGTTGACATCTATGAA |
| | GTATTTTGTGAAAATAGGACCTGAGCGCACCTGTTGTCTATGTGATAGACGTGCCACATGCTTTTCC |
| | ACTGCTTCAGACACTTATGCCTGTTGGCATCATTCTATTGGATTTGATTACGTCTATAATCCGTTTA |
| | TGATTGATGTTCAACAATGGGGTTTTACAGGTAACCTACAAAGCAACCATGATCTGTATTGTCAAGT |
| | CCATGGTAATGCACATGTAGCTAGTTGTGATGCAATCATGACTAGGTGTCTAGCTGTCCACGAGTGC |
| | TTTGTTAAGCGTGTTGACTGGACTATTGAATATCCTATAATTGGTGATGAACTGAAGATTAATGCGG |
| | CTTGTAGAAAGGTTCAACACATGGTTGTTAAAGCTGCATTATTAGCAGACAAATTCCCAGTTCTTCA |
| | CGACATTGGTAACCCTAAAGCTATTAAGTGTGTACCTCAAGCTGATGTAGAATGGAAGTTCTATGAT |
| | GCACAGCCTTGTAGTGACAAAGCTTATAAAATAGAAGAATTATTCTATTCTTATGCCACACATTCTG |
| | ACAAATTCACAGATGGTGTATGCCTATTTTGGAATTGCAATGTCGATAGATATCCTGCTAATTCCAT |
| | TGTTTGTAGATTTGACACTAGAGTGCTATCTAACCTTAACTTGCCTGGTTGTGATGGTGGCAGTTTG |
| | TATGTAAATAAACATGCATTCCACACACCAGCTTTTGATAAAAGTGCTTTTGTTAATTTAAAACAAT |
| | TACCATTTTTCTATTACTCTGACAGTCCATGTGAGTCTCATGGAAAACAAGTAGTGTCAGATATAGA |
| | TTATGTACCACTAAAGTCTGCTACGTGTATAACACGTTGCAATTTAGGTGGTGCTGTCTGTAGACAT |
| | CATGCTAATGAGTACAGATTGTATCTCGATGCTTATAACATGATGATCTCAGCTGGCTTTAGCTTGT |
| | GGGTTTACAAACAATTTGATACTTATAACCTCTGGAACACTTTTACAAGACTTCAGAGTTTAGAAAA |
| | TGTGGCTTTTAATGTTGTAAATAAGGGACACTTTGATGGACAACAGGGTGAAGTACCAGTTTCTATC |
| | ATTAATAACACTGTTTACACAAAAGTTGATGGTGTTGATGTAGAATTGTTTGAAAATAAAACAACAT |
| | TACCTGTTAATGTAGCATTTGAGCTTTGGGCTAAGCGCAACATTAAACCAGTACCAGAGGTGAAAAT |
| | ACTCAATAATTTGGGTGTGGACATTGOTGCTAATACTGTGATCTGGGACTACAAAAGAGATGOTCCA |
| | GCACATATATCTACTATTGGTGTTTGTTCTATGACTGACATAGCCAAGAAACCAACTGAAACGATTT |
| | GTGCACCACTCACTGTCTTTTTTGATGGTAGAGTTGATGGTCAAGTAGACTTATTTAGAAATGCCCG |
| | TAATGGTGTTCTTATTACAGAAGGTAGTGTTAAAGGTTTACAACCATCTGTAGGTCCCAAACAAGCT |
| | AGTCTTAATGGAGTCACATTAATTGGAGAAGCCGTAAAAACACAGTTCAATTATTATAAGAAAGTTG |
| | ATGGTGTTGTCCAACAATTACCTGAAACTTACTTTACTCAGAGTAGAAATTTACAAGAATTTAAACC |
| | CAGGAGTCAAATGGAAATTGATTTCTTAGAATTAGCTATGGATGAATTCATTGAACGGTATAAATTA |
| | GAAGGCTATGCCTTCGAACATATCGTTTATGGAGATTTTAGTCATAGTCAGTTAGGTGGTTTACATC |
| | TACTGATTGGACTAGCTAAACGTTTTAAGGAATCACCTTTTGAATTAGAAGATTTTATTCCTATGGA |
| | CAGTACAGTTAAAAACTATTTCATAACAGATGCGCAAACAGGTTCATCTAAGTGTGTGTGTTCTGTT |
| | ATTGATTTATTACTTGATGATTTTGTTGAAATAATAAAATCCCAAGATTTATCTGTAGTTTCTAAGG |
| | TTGTCAAAGTGACTATTGACTATACAGAAATTTCATTTATGCTTTGGTGTAAAGATGGCCATGTAGA |
| | AACATTTTACCCAAAATTACAATCTAGTCAAGCGTGGCAACCGGGTGTTGCTATGCCTAATCTTTAC |
| | AAAATGCAAAGAATGCTATTAGAAAAGTGTGACCTTCAAAATTATGGTGATAGTGCAACATTACCTA |
| | AAGGCATAATGATGAATGTCGCAAAATATACTCAACTGTGTCAATATTTAAACACATTAACATTAGC |
| | TGTACCCTATAATATGAGAGTTATACATTTTGGTGCTGGTTCTGATAAAGGAGTTGCACCAGGTACA |
| | GCTGTTTTAAGACAGTGGTTGCCTACGGGTACGCTGCTTGTCGATTCAGATCTTAATGACTTTGTCT |
| | CTGATGCAGATTCAACTTTGATTGGTGATTGTGCAACTGTACATACAGCTAATAAATGGGATCTCAT |
| | TATTAGTGATATGTACGACCCTAAGACTAAAAATGTTACAAAAGAAAATGACTCTAAAGAGGGTTTT |
| | TTCACTTACATTTGTGGGTTTATACAACAAAAGCTAGCTCTTGGAGGTTCCGTGGCTATAAAGATAA |
| | CAGAACATTCTTGGAATGCTGATCTTTATAAGCTCATGGGACACTTCGCATGGTGGACAGCCTTTGT |
| | TACTAATGTGAATGCGTCATCATCTGAAGCATTTTTAATTGGATGTAATTATCTTGGCAAACCACGC |
| | GAACAAATAGATGGTTATGTCATGCATGCAAATTACATATTTTGGAGGAATACAAATCCAATTCAGT |
| | TGTCTTCCTATTCTTTATTTGACATGAGTAAATTTCCCCTTAAATTAAGGGGTACTGCTGTTATGTC |
| | TTTAAAAGAAGGTCAAATCAATGATATGATTTTATCTCTTCTTAGTAAAGGTAGACTTATAATTAGA |
| | GAAAACAACAGAGTTGTTATTTCTAGTGATGTTCTTGTTAACAACTAAACGAACAATGTTTGTTTTT |
| | CTTGTTTTATTGCCACTAGTCTCTAGTCAGTGTGTTAATCTTACAACCAGAACTCAATTACCCCCTG |
| | CATACACTAATTCTTTCACACGTGGTGTTTATTACCCTGACAAAGTTTTCAGATCCTCAGTTTTACA |
| | TTCAACTCAGGACTTGTTCTTACCTTTCTTTTCCAATGTTACTTGGTTCCATGCTATACATGTCTCT |
| | GGGACCAATGGTACTAAGAGGTTTGATAACCCTGTCCTACCATTTAATGATGGTGTTTATTTTGCTT |
| | CCACTGAGAAGTCTAACATAATAAGAGGCTGGATTTTTGGTACTACTTTAGATTCGAAGACCCAGTC |
| | CCTACTTATTGTTAATAACGCTACTAATGTTGTTATTAAAGTCTGTGAATTTCAATTTTGTAATGAT |
| | CCATTTTTGGGTGTTTATTACCACAAAAACAACAAAAGTTGGATGGAAAGTGAGTTCAGAGTTTATT |
| | CTAGTGCGAATAATTGCACTTTTGAATATGTCTCTCAGCCTTTTCTTATGGACCTTGAAGGAAAACA |
| | GGGTAATTTCAAAAATCTTAGGGAATTTGTGTTTAAGAATATTGATGGTTATTTTAAAATATATTCT |
| | AAGCACACGCCTATTAATTTAGTGCGTGATCTCCCTCAGGGTTTTTCGGCTTTAGAACCATTGGTAG |
| | ATTTGCCAATAGGTATTAACATCACTAGGTTTCAAACTTTACTTGCTTTACATAGAAGTTATTTGAC |
| | TCCTGGTGATTCTTCTTCAGGTTGGACAGCTGGTGCTGCAGCTTATTATGTGGGTTATCTTCAACCT |
| | AGGACTTTTCTATTAAAATATAATGAAAATGGAACCATTACAGATGCTGTAGACTGTGCACTTGACC |
| | CTCTCTCAGAAACAAAGTGTACGTTGAAATCCTTCACTGTAGAAAAAGGAATCTATCAAACTTCTAA |
| | CTTTAGAGTCCAACCAACAGAATCTATTGTTAGATTTCCTAATATTACAAACTTGTGCCCTTTTGGT |
| | GAAGTTTTTAACGCCACCAGATTTGCATCTGTTTATGCTTGGAACAGGAAGAGAATCAGCAACTGTG |
| | TTGCTGATTATTCTGTCCTATATAATTCCGCATCATTTTCCACTTTTAAGTGTTATGGAGTGTCTCC |
| | TACTAAATTAAATGATCTCTGCTTTACTAATGTCTATGCAGATTCATTTGTAATTAGAGGTGATGAA |
| | GTCAGACAAATCGCTCCAGGGCAAACTGGAAAGATTGCTGATTATAATTATAAATTACCAGATGATT |
| | TTACAGGCTGCGTTATAGCTTGGAATTCTAACAATCTTGATTCTAAGGTTGGTGGTAATTATAATTA |
| | CCTGTATAGATTGTTTAGGAAGTCTAATCTCAAACCTTTTGAGAGAGATATTTCAACTGAAATCTAT |
| | CAGGCCGGTAGCACACCTTGTAATGGTGTTGAAGGTTTTAATTGTTACTTTCCTTTACAATCATATG |
| | GTTTCCAACCCACTAATGGTGTTGGTTACCAACCATACAGAGTAGTAGTACTTTCTTTTGAACTTCT |
| | ACATGCACCAGCAACTGTTTGTGGACCTAAAAAGTCTACTAATTTGGTTAAAAACAAATGTGTCAAT |
| | TTCAACTTCAATGGTTTAACAGGCACAGGTGTTCTTACTGAGTCTAACAAAAAGTTTCTGCCTTTCC |
| | AACAATTTGGCAGAGACATTGCTGACACTACTGATGCTGTCCGTGATCCACAGACACTTGAGATTCT |
| | TGACATTACACCATGTTCTTTTGGTGGTGTCAGTGTTATAACACCAGGAACAAATACTTCTAACCAG |
| | GTTGCTGTTCTTTATCAGGATGTTAACTGCACAGAAGTCCCTGTTGCTATTCATGCAGATCAACTTA |
| | CTCCTACTTGGCGTGTTTATTCTACAGGTTCTAATGTTTTTCAAACACGTGCAGGCTGTTTAATAGG |
| | GGCTGAACATGTCAACAACTCATATGAGTGTGACATACCCATTGGTGCAGGTATATGCGCTAGTTAT |
| | CAGACTCAGACTAATTCTCCTCGGCGGGCACGTAGTGTAGCTAGTCAATCCATCATTGCCTACACTA |
| | TGTCACTTGGTGCAGAAAATTCAGTTGCTTACTCTAATAACTCTATTGCCATACCCACAAATTTTAC |
| | TATTAGTGTTACCACAGAAATTCTACCAGTGTCTATGACCAAGACATCAGTAGATTGTACAATGTAC |
| | ATTTGTGGTGATTCAACTGAATGCAGCAATCTTTTGTTGCAATATGGCAGTTTTTGTACACAATTAA |
| | ACCGTGCTTTAACTGGAATAGCTGTTGAACAAGACAAAAACACCCAAGAAGTTTTTGCACAAGTCAA |
| | ACAAATTTACAAAACACCACCAATTAAAGATTTTGGTGGTTTTAATTTTTCACAAATATTACCAGAT |
| | CCATCAAAACCAAGCAAGAGGTCATTTATTGAAGATCTACTTTTCAACAAAGTGACACTTGCAGATG |
| | CTGGCTTCATCAAACAATATGGTGATTGCCTTGGTGATATTGCTGCTAGAGACCTCATTTGTGCACA |
| | AAAGTTTAACGGCCTTACTGTTTTGCCACCTTTGCTCACAGATGAAATGATTGCTCAATACACTTCT |
| | GCACTGTTAGCGGGTACAATCACTTCTGGTTGGACCTTTGGTGCAGGTGCTGCATTACAAATACCAT |
| | TTGCTATGCAAATGGCTTATAGGTTTAATGGTATTGGAGTTACACAGAATGTTCTCTATGAGAACCA |
| | AAAATTGATTGCCAACCAATTTAATAGTGCTATTGGCAAAATTCAAGACTCACTTTCTTCCACAGCA |
| | AGTGCACTTGGAAAACTTCAAGATGTGGTCAACCAAAATGCACAAGCTTTAAACACGCTTGTTAAAC |
| | AACTTAGCTCCAATTTTGGTGCAATTTCAAGTGTTTTAAATGATATCCTTTCACGTCTTGACAAAGT |
| | TGAGGCTGAAGTGCAAATTGATAGGTTGATCACAGGCAGACTTCAAAGTTTGCAGACATATGTGACT |
| | CAACAATTAATTAGAGCTGCAGAAATCAGAGCTTCTGCTAATCTTGCTGCTACTAAAATGTCAGAGT |
| | GTGTACTTGGACAATCAAAAAGAGTTGATTTTTGTGGAAAGGGCTATCATCTTATGTCCTTCCCTCA |
| | GTCAGCACCTCATGGTGTAGTCTTCTTGCATGTGACTTATGTCCCTGCACAAGAAAAGAACTTCACA |
| | ACTGCTCCTGCCATTTGTCATGATGGAAAAGCACACTTTCCTCGTGAAGGTGTCTTTGTTTCAAATG |
| | GCACACACTGGTTTGTAACACAAAGGAATTTTTATGAACCACAAATCATTACTACAGACAACACATT |
| | TGTGTCTGGTAACTGTGATGTTGTAATAGGAATTGTCAACAACACAGTTTATGATCCTTTGCAACCT |
| | GAATTAGACTCATTCAAGGAGGAGTTAGATAAATATTTTAAGAATCATACATCACCAGATGTTGATT |
| | TAGGTGACATCTCTGGCATTAATGCTTCAGTTGTAAACATTCAAAAAGAAATTGACCGCCTCAATGA |
| | GGTTGCCAAGAATTTAAATGAATCTCTCATCGATCTCCAAGAACTTGGAAAGTATGAGCAGTATATA |
| | AAATGGCCATGGTACATTTGGCTAGGTTTTATAGCTGGCTTGATTGCCATAGTAATGGTGACAATTA |
| | TGCTTTGCTGTATGACCAGTTGCTGTAGTTGTCTCAAGGGCTGTTGTTCTTGTGGATCCTGCTGCAA |
| | ATTTGATGAAGACGACTCTGAGCCAGTGCTCAAAGGAGTCAAATTACATTACACATAAACGAACTTA |
| | TGGATTTGTTTATGAGAATCTTCACAATTGGAACTGTAACTTTGAAGCAAGGTGAAATCAAGGATGC |
| | TACTCCTTCAGATTTTGTTCGCGCTACTGCAACGATACCGATACAAGCCTCACTCCCTTTCGGATGG |
| | CTTATTGTTGGCGTTGCACTTCTTGCTGTTTTTCAGAGCGCTTCCAAAATCATAACCCTCAAAAAGA |
| | GATGGCAACTAGCACTCTCCAAGGGTGTTCACTTTGTTTGCAACTTGCTGTTGTTGTTTGTAACAGT |
| | TTACTCACACCTTTTGCTCGTTGCTGCTGGCCTTGAAGCCCCTTTTCTCTATCTTTATGCTTTAGTC |
| | TACTTCTTGCAGAGTATAAACTTTGTAAGAATAATAATGAGGCTTTGGCTTTGCTGGAAATGCCGTT |
| | CCAAAAACCCATTACTTTATGATGCCAACTATTTTCTTTGCTGGCATACTAATTGTTACGACTATTG |
| | TATACCTTACAATAGTGTAACTTCTTCAATTGTCATTACTTCAGGTGATGGCACAACAAGTCCTATT |
| | TCTGAACATGACTACCAGATTGGTGGTTATACTGAAAAATGGGAATCTGGAGTAAAAGACTGTGTTG |
| | TATTACACAGTTACTTCACTTCAGACTATTACCAGCTGTACTCAACTCAATTGAGTACAGACACTGG |
| | TGTTGAACATGTTACCTTCTTCATCTACAATAAAATTGTTGATGAGCCTGAAGAACATGTCCAAATT |
| | CACACAATCGACGGTTCATCCGGAGTTGTTAATCCAGTAATGGAACCAATTTATGATGAACCGACGA |
| | CGACTACTAGCGTGCCTTTGTAAGCACAAGCTGATGAGTACGAACTTATGTACTCATTCGTTTCGGA |
| | AGAGACAGGTACGTTAATAGTTAATAGCGTACTTCTTTTTCTTGCTTTCGTGGTATTCTTGCTAGTT |
| | ACACTAGCCATCCTTACTGCGCTTCGATTGTGTGCGTACTGCTGCAATATTGTTAACGTGAGTCTTG |
| | TAAAACCTTCTTTTTACGTTTACTCTCGTGTTAAAAATCTGAATTCTTCTAGAGTTCCTGATCTTCT |
| | GGTCTAAACGAACTAAATATTATATTAGTTTTTCTGTTTGGAACTTTAATTTTAGCCATGGCAGATT |
| | CCAACGGTACTATTACCGTTGAAGAGCTTAAAAAGCTCCTTGAACAATGGAACCTAGTAATAGGTTT |
| | CCTATTCCTTACATGGATTTGTCTTCTACAATTTGCCTATGCCAACAGGAATAGGTTTTTGTATATA |
| | ATTAAGTTAATTTTCCTCTGGCTGTTATGGCCAGTAACTTTAGCTTGTTTTGTGCTTGCTGCTGTTT |
| | ACAGAATAAATTGGATCACCGGTGGAATTGCTATCGCAATGGCTTGTCTTGTAGGCTTGATGTGGCT |
| | CAGCTACTTCATTGCTTCTTTCAGACTGTTTGCGCGTACGCGTTCCATGTGGTCATTCAATCCAGAA |
| | ACTAACATTCTTCTCAACGTGCCACTCCATGGCACTATTCTGACCAGACCGCTTCTAGAAAGTGAAC |
| | TCGTAATCGGAGCTGTGATCCTTCGTGGACATCTTCGTATTGCTGGACACCATCTAGGACGCTGTGA |
| | CATCAAGGACCTGCCTAAAGAAATCACTGTTGCTACATCACGAACGCTTTCTTATTACAAATTGGGA |
| | GCTTCGCAGCGTGTAGCAGGTGACTCAGGTTTTGCTGCATACAGTCGCTACAGGATTGGCAACTATA |
| | AATTAAACACAGACCATTCCAGTAGCAGTGACAATATTGCTTTGCTTGTACAGTAAGTGACAACAGA |
| | TGTTTCATCTCGTTGACTTTCAGGTTACTATAGCAGAGATATTACTAATTATTATGAGGACTTTTAA |
| | AGTTTCCATTTGGAATCTTGATTACATCATAAACCTCATAATTAAAAATTTATCTAAGTCACTAACT |
| | GAGAATAAATATTCTCAATTAGATGAAGAGCAACCAATGGAGATTGATTAAACGAACATGAAAATTA |
| | TTCTTTTCTTGGCACTGATAACACTCGCTACTTGTGAGCTTTATCACTACCAAGAGTGTGTTAGAGG |
| | TACAACAGTACTTTTAAAAGAACCTTGCTCTTCTGGAACATACGAGGGCAATTCACCATTTCATCCT |
| | CTAGCTGATAACAAATTTGCACTGACTTGCTTTAGCACTCAATTTGCTTTTGCTTGTCCTGACGGCG |
| | TAAAACACGTCTATCAGTTACGTGCCAGATCAGTTTCACCTAAACTGTTCATCAGACAAGAGGAAGT |
| | TCAAGAACTTTACTCTCCAATTTTTCTTATTGTTGCGGCAATAGTGTTTATAACACTTTGCTTCACA |
| | CTCAAAAGAAAGACAGAATGATTGAACTTTCATTAATTGACTTCTATTTGTGCTTTTTAGCCTTTCT |
| | GCTATTCCTTGTTTTAATTATGCTTATTATCTTTTGGTTCTCACTTGAACTGCAAGATCATAATGAA |
| | ACTTGTCACGCCTAAACGAACATGAAATTTCTTGTTTTCTTAGGAATCATCACAACTGTAGCTGCAT |
| | TTCACCAAGAATGTAGTTTACAGTCATGTACTCAACATCAACCATATGTAGTTGATGACCCGTGTCC |
| | TATTCACTTCTATTCTAAATGGTATATTAGAGTAGGAGCTAGAAAATCAGCACCTTTAATTGAATTG |
| | TGCGTGGATGAGGCTGGTTCTAAATCACCCATTCAGTACATCGATATCGGTAATTATACAGTTTCCT |
| | GTTCACCTTTTACAATTAATTGCCAGGAACCTAAATTGGGTAGTCTTGTAGTGCGTTGTTCGTTCTA |
| | TGAAGACTTTTTAGAGTATCATGACGTTCGTGTTGTTTTAGATTTCATCTAAACGAACAAACTAAAA |
| | TGTCTGATAATGGACCCCAAAATCAGCGAAATGCACCCCGCATTACGTTTGGTGGACCCTCAGATTC |
| | AACTGGCAGTAACCAGAATGGAGAACGCAGTGGGGCGCGATCAAAACAACGTCGGCCCCAAGGTTTA |
| | CCCAATAATACTGCGTCTTGGTTCACCGCTCTCACTCAACATGGCAAGGAAGACCTTAAATTCCCTC |
| | GAGGACAAGGCGTTCCAATTAACACCAATAGCAGTCCAGATGACCAAATTGGCTACTACCGAAGAGC |
| | TACCAGACGAATTCGTGGTGGTGACGGTAAAATGAAAGATCTCAGTCCAAGATGGTATTTCTACTAC |
| | CTAGGAACTGGGCCAGAAGCTGGACTTCCCTATGGTGCTAACAAAGACGGCATCATATGGGTTGCAA |
| | CTGAGGGAGCCTTGAATACACCAAAAGATCACATTGGCACCCGCAATCCTGCTAACAATGCTGCAAT |
| | CGTGCTACAACTTCCTCAAGGAACAACATTGCCAAAAGGCTTCTACGCAGAAGGGAGCAGAGGCGGC |
| | AGTCAAGCCTCTTCTCGTTCCTCATCACGTAGTCGCAACAGTTCAAGAAATTCAACTCCAGGCAGCA |
| | GTAGGGGAACTTCTCCTGCTAGAATGGCTGGCAATGGCGGTGATGCTGCTCTTGCTTTGCTGCTGCT |
| | TGACAGATTGAACCAGCTTGAGAGCAAAATGTCTGGTAAAGGCCAACAACAACAAGGCCAAACTGTC |
| | ACTAAGAAATCTGCTGCTGAGGCTTCTAAGAAGCCTCGGCAAAAACGTACTGCCACTAAAGCATACA |
| | ATGTAACACAAGCTTTCGGCAGACGTGGTCCAGAACAAACCCAAGGAAATTTTGGGGACCAGGAACT |
| | AATCAGACAAGGAACTGATTACAAACATTGGCCGCAAATTGCACAATTTGCCCCCAGCGCTTCAGCG |
| | TTCTTCGGAATGTCGCGCATTGGCATGGAAGTCACACCTTCGGGAACGTGGTTGACCTACACAGGTG |
| | CCATCAAATTGGATGACAAAGATCCAAATTTCAAAGATCAAGTCATTTTGCTGAATAAGCATATTGA |
| | CGCATACAAAACATTCCCACCAACAGAGCCTAAAAAGGACAAAAAGAAGAAGGCTGATGAAACTCAA |
| | GCCTTACCGCAGAGACAGAAGAAACAGCAAACTGTGACTCTTCTTCCTGCTGCAGATTTGGATGATT |
| | TCTCCAAACAATTGCAACAATCCATGAGCAGTGCTGACTCAACTCAGGCCTAAACTCATGCAGACCA |
| | CACAAGGCAGATGGGCTATATAAACGTTTTCGCTTTTCCGTTTACGATATATAGTCTACTCTTGTGC |
| | AGAATGAATTCTCGTAACTACATAGCACAAGTAGATGTAGTTAACTTTAATCTCACATAGCAATCTT |
| | TAATCAGTGTGTAACATTAGGGAGGACTTGAAAGAGCCACCACATTTTCACCGAGGCCACGCGGAGT |
| | ACGATCGAGTGTACAGTGAACAATGCTAGGGAGAGCTGCCTATATGGAAGAGCCCTAATGTGTAAAA |
| | TTAATTTTAGTAGTGCTATCCCCATGTGATTTTAATAGCTTCTTAGGAGAATGACAAAAAAAAAAAA |

[0156] This application hereby incorporates by reference PCT/US2020/019924 (which was published as WO 2020/176638) in its entirety, particularly with respect to luciferase enzymes and reactions, polymerase extension reactions and techniques, the coupled enzymatic reaction involving glyceraldehyde 3-phosphate dehydrogenase and phosphoglycerate kinase to produce ATP, the enzymatic reaction involving adenosine 5′-phosphosulfate and free phosphates in the presence of adenosine triphosphate sulfurylase to produce ATP, quantification and quantitation of bioluminescent readout signal, multiplexing, solid supports, enzyme immobilization techniques, control reactions, and kits.

[0157] Various of the above-disclosed and other features and functions, or alternatives thereof, may be combined into many other different systems or applications. Various presently unforeseen or unanticipated alternatives, modifications, variations or improvements therein may be subsequently made by those skilled in the art, each of which is also intended to be encompassed by the disclosed embodiments.

### EXAMPLES

[0158] The examples below are intended to exemplify the practice of embodiments of the disclosure but are by no means intended to limit the scope thereof.

### Example 1—Design of ID-Oligo Molecules that Target Strain/Virus Specific Domains

[0159] The ID-Oligo design process begins with the identification of genomic regions that are free of uracil or thymine (RNA or DNA respectively). Uracil/thymine-free regions were selected with their length in mind (e.g., sequence greater than 15, 20, 22, 25, or 30 nucleotides in length) (Table 10), because longer stretches theoretically produce a higher signal (FIG. 1B). This guiding process simplifies/streamlines/accelerates the selection of regions to serve as the complement for the ID-Oligos.

TABLE 10
Selected Uracil/Thymine-Free Region Positions with
SARS-CoV-Urbani Genome

| Region Length | Uracil/Thymine-Free Region Position within the | | | | | | | |
|---|---|---|---|---|---|---|---|---|
| (Base Pairs) | SARS-CoV-Urbani Viral Genome | | | | | | | |
| 15 | 29,604 | 29,582 | 29,414 | 29,282 | 29,241 | 29,225 | 28,971 | 28,845 |
| | 28,651 | 28,557 | 27,638 | 26,744 | 24,676 | 24,607 | 24,203 | 22,696 |
| | 22,524 | 21,449 | 21,239 | 20,025 | 19,827 | 19,613 | 18,205 | 17,563 |
| | 17,395 | 12,858 | 12,264 | 10,129 | 9,958 | 8,406 | 6,299 | 6,201 |
| | 5,159 | 4,353 | 3,816 | 3,437 | 3,252 | 3,198 | 3,066 | 2,658 |
| | 2,478 | 1,812 | 1,024 | 893 | 302 | 32 | | |
| 20 | 29,287 | 29,246 | 28,976 | 28,850 | 28,656 | 28,241 | 19,832 | 19,618 |
| | 12,863 | 3,821 | 3,203 | 37 | | | | |
| 22 | 29,289 | 29,248 | 28,852 | 28,658 | 28,243 | 19,834 | 3,823 | 39 |
| 25 | 29,292 | 28,855 | 28,661 | 28,246 | 3,826 | | | |
| 30 | 28,251 | | | | | | | |

[0160] Next, the ID-Oligo molecules were designed to bind adjacent to a uracil/thymine-free region in the target SARS-CoV-2 genome. Table 11 lists regions 3′ to uracil/thymine-free sequences (organized by position on the genome) (SEQ ID NOs:10-89), which are potential targets for ID-Oligos for detection of the SARS-CoV-2 virus. Also listed in Table 11 are the sequences for the ID-Oligos (SEQ ID NOs:90-169), as well as the uracil/thymine free template sequences (SEQ ID NOs:170-249).

TABLE 11
SARS-CoV-2 Genomic Regions 3′ to Uracil/Thymine-Free Sequences

| | | | SEQ ID | | SEQ ID | ID-Oligo | | SEQ ID | T-Free |
|---|---|---|---|---|---|---|---|---|---|
| position | ID-Oligo NAME | Region for ID-Oligo | NO: | ID-Oligo (rev + comp) | NO: | (Length) | T-Free seq | NO: | (Length) |
| 27096 | SARS-CoV-2A#80 | TTCCAGTAGCAGTGACAA | 10 | TTGTCACTGCTACTGGAA | 90 | 18 | AAACACAGACCA | 170 | 12 |
| 26217 | SARS-CoV-2A#79 | TACGTTAATAGTTAATAGCGT | 11 | CGCTATTAACTATTAACGTA | 91 | 20 | CGGAAGAGACAGG | 171 | 13 |
| 26144 | SARS-CoV-2A#78 | TACTAGCGTGCCTTTGTAA | 12 | TTACAAAGGCACGCTAGTA | 92 | 19 | GAACCGACGACGAC | 172 | 14 |
| 24867 | SARS-CoV-2A#77 | TTTGTGTCTGGTAACTGTGA | 13 | TCACAGTTACCAGACACAAA | 93 | 20 | ACAGACAACACA | 173 | 12 |
| 24830 | SARS-CoV-2A#76 | TTTTTATGAACCACAAATC | 14 | GATTTGTGGTTCATAAAAA | 94 | 19 | AACACAAAGGAA | 174 | 12 |
| 24771 | SARS-CoV-2A#75 | TTTCCTCGTGAAGGTGTC | 15 | GACACCTTCACGAGGAAA | 95 | 18 | GGAAAAGCACAC | 175 | 12 |
| 24726 | SARS-CoV-2A#74 | TTCACAACTGCTCCTGCCAT | 16 | ATGGCAGGAGCAGTTGTGAA | 96 | 20 | GCACAAGAAAAGAAC | 176 | 15 |
| 24270 | SARS-CoV-2A#73 | TTGATTGCCAACCAATTTA | 17 | TAAATTGGTTGGCAATCAA | 97 | 19 | GAGAACCAAAAA | 177 | 12 |
| 23947 | SARS-CoV-2A#72 | TCATTTATTGAAGATCTA | 18 | TAGATCTTCAATAAATGA | 98 | 18 | CAAAACCAAGCAAGAGG | 178 | 17 |
| 23884 | SARS-CoV-2A#71 | TTAAAGATTTTGGTGGTTTTAA | 19 | AAAACCACCAAAATCTTTAA | 99 | 20 | ACAAAACACCACCAA | 179 | 15 |
| 23835 | SARS-CoV-2A#70 | TTTTTGCACAAGTCAAACAAA | 20 | TTGTTTGACTTGTGCAAAAA | 100 | 20 | GAACAAGACAAAAACAC | 180 | 25 |
| | | | | | | | CCAAGAAG | | |
| 23312 | SARS-CoV-2A#69 | TACTTCTAACCAGGTTGCT | 21 | AGCAACCTGGTTAGAAGTA | 101 | 19 | AACACCAGGAACAAA | 181 | 15 |
| 23156 | SARS-CoV-2A#68 | TGTTCTTACTGAGTCTAACA | 22 | TGTTAGACTCAGTAAGAACA | 102 | 20 | AACAGGCACAGG | 182 | 12 |
| 22576 | SARS-CoV-2A#67 | TCAGCAACTG TGTTGCTGAT | 23 | TCAGCAACACAGTTGCTGA | 103 | 20 | AACAGGAAGAGAA | 183 | 14 |
| 22545 | SARS-CoV-2A#66 | TTTGCATCTGTTTATGC | 24 | GCATAAACAGATGCAAA | 104 | 17 | AACGCCACCAGA | 184 | 12 |
| 22478 | SARS-CoV-2A#65 | TCTATTGTTAGATTTCCTAA | 25 | TTAGGAAATCTAACAATAGA | 105 | 20 | CCAACCAACAGAA | 185 | 14 |
| 22056 | SARS-CoV-2A#64 | TAATTTCAAAAATCTTAGGG | 26 | CCCTAAGATTTTTGAAATTA | 106 | 20 | GAAGGAAAACAGGG | 186 | 14 |
| 21952 | SARS-CoV-2A#63 | TTGGATGGAAAGTGAGTTCA | 27 | TGAACTCACTTTCCATCCAA | 107 | 20 | ACCACAAAAACAACAAA | 187 | 19 |
| | | | | | | | AG | | |
| 21461 | SARS-CoV-2A#62 | TTGTTATTTCTAGTGATG | 28 | CATCACTAGAAATAACAA | 108 | 18 | AGAGAAAACAACAGAG | 188 | 16 |
| 21251 | SARS-CoV-2A#61 | TAGATGGTTATGTCATGCAT | 29 | ATGCATGACATAACCATCTA | 109 | 20 | GGCAAACCACGCGAAC | 189 | 19 |
| | | | | | | | AAA | | |
| 19897 | SARS-CoV-2A#60 | TGAAACGATTTGTGCACCA | 30 | TGGTGCACAAATCGTTTCA | 110 | 19 | AGCCAAGAAACCAAC | 190 | 15 |
| 19273 | SARS-CoV-2A#59 | TTTTGATAAAAGTGCTTT | 31 | AAAGCACTTTTATCAAAA | 111 | 18 | CCACACACCAGC | 191 | 12 |
| 18754 | SARS-CoV-2A#58 | TGATCTGTATTGTCAAGTC | 32 | GACTTGACAATACAGATCA | 112 | 19 | ACAAAGC AACCA | 192 | 13 |
| 18217 | SARS-CoV-2A#57 | TATAAGACATGTACGTGCA | 33 | TGCACGTACATGTCTTATA | 113 | 19 | CACCCGCGAAGAAGC | 193 | 15 |
| 17888 | SARS-CoV-2A#56 | TAGGCATACTTTGCATAATG | 34 | CATTATGCAAAGTATGCCTA | 114 | 20 | ACCAGAGCAAAAG | 194 | 13 |
| 17657 | SARS-CoV-2A#55 | TAGGCGTGGTAAGAGAATTC | 35 | GAATTCTCTTACCACGCCTA | 115 | 20 | AACAGGCCACAAA | 195 | 13 |
| 17411 | SARS-CoV-2A#54 | TTGCTAACTAAGGGCACA | 36 | TGTGCCCTTAGTTAGCAA | 116 | 18 | GCACCACGCACA | 196 | 12 |
| 17285 | SARS-CoV-2A#53 | TATAGTTGTCTTTGATGAA | 37 | TTCATCAAAGACAACTATA | 117 | 19 | GAGACGACAGCAGA | 197 | 14 |
| 17032 | SARS-CoV-2A#52 | TGGTACTGGTAAGAGTCA | 38 | TGACTCTTACCAGTACCA | 118 | 18 | CCAGGGACCACC | 198 | 12 |
| 16915 | SARS-CoV-2A#51 | TATGTTAGAATTACTGGC | 39 | GCCAGTAATTCTAACATA | 119 | 18 | GCCACAAGAGCAC | 199 | 13 |
| 16592 | SARS-CoV-2A#50 | TCAAAGCTACTGAGGAGACA | 40 | TGTCTCCTCAGTAGCTTTGA | 120 | 20 | GCAGCAGAAACGC | 200 | 13 |
| 15164 | SARS-CoV-2A#49 | TTCTATGGTGGTTGGCAC | 41 | GTGCCAACCACCATAGAA | 121 | 18 | GGAACAAGCAAA | 201 | 12 |
| 14221 | SARS-CoV-2A#48 | TCTTTGACCGTTATTTTAAA | 42 | TTTAAAATAACGGTCAAAGA | 122 | 20 | CACGGAAGAGAGGTTAA | 202 | 20 |
| | | | | | | | AAC | | |
| 14065 | SARS-CoV-2A#47 | TAGTGGAGTTCCTGTTGTAG | 43 | CTACAACAGGAACTCCACTA | 123 | 20 | ACAAACCACGCCAGG | 203 | 15 |
| 13894 | SARS-CoV-2A#46 | TATATTACGCGTATACGCC | 44 | GGCGTATACGCGTAATATA | 124 | 19 | AGAAAACCCAGA | 204 | 12 |
| 13461 | SARS-CoV-2A#45 | TGACAATTTAATTGATTCT | 45 | AGAATCAATTAAATTGTCA | 125 | 19 | CCAAGAAAAGGACGAA | 205 | 18 |
| | | | | | | | GA | | |
| 13152 | SARS-CoV-2A#44 | TAGTACTGATGTCGTATACA | 46 | TGTATACGACATCAGTACTA | 126 | 20 | GCGGCACAGGCAC | 206 | 13 |
| 13080 | SARS-CoV-2A#43 | TATGGATCAAGAATCCTTT | 47 | AAAGGATTCTTGATCCATA | 127 | 19 | ACACCGGAAGCCAA | 207 | 14 |
| 12736 | SARS-CoV-2A#42 | TCACTAATTGTGTTAAGA | 48 | TCTTAACACAATTAGTGA | 128 | 18 | GGGGGACAACCAA | 208 | 13 |
| 12414 | SARS-CoV-2A#41 | TAGGTTTGTACTTGCACT | 49 | AGTGCAAGTACAAACCTA | 129 | 18 | ACAACACAACAAAGGGA | 209 | 19 |
| | | | | | | | GG | | |
| 12276 | SARS-CoV-2A#40 | TAATGGTTGTCATACCAGAC | 50 | GTCTGGTATGACAACCATTA | 130 | 20 | ACAACAGCAGCCAAAC | 210 | 16 |
| 12026 | SARS-CoV-2A#39 | TTACTAGTGCTATGCAGAC | 51 | GTCTGCATAGCACTAGTAA | 131 | 19 | GAGGACAAGAGGGCA | 211 | 20 |
| | | | | | | | AAAG | | |
| 11708 | SARS-CoV-2A#38 | TTACAAGCTATAGCCTCAG | 52 | CTGAGGCTATAGCTTGTAA | 132 | 19 | GGACAACAGGGCAACC | 212 | 16 |
| 11306 | SARS-CoV-2A#37 | TAGCATAGATGCCTTCAAACT | 53 | GTTTGAAGGCATCTATGCTA | 133 | 20 | GACTACTCCCACCCAAG | 213 | 19 |
| | | | | | | | AA | | |
| 10736 | SARS-CoV-2A#36 | TGTGTATGATGATGGTGCTA | 54 | TAGCACCATCATCATACACA | 134 | 20 | GACAGCAAGAAC | 214 | 12 |
| 10569 | SARS-CoV-2A#35 | TGTTGACATACTAGGACCTC | 55 | GAGGTCCTAGTATGTCAACA | 135 | 20 | AACACAAGACCA | 215 | 12 |
| 10329 | SARS-CoV-2A#34 | TGGTACGGACACAACTATT | 56 | AATAGTTGTGTCCGTACCA | 136 | 19 | GACAGGCAAACAGCAC | 216 | 23 |
| | | | | | | | AAGCAGC | | |
| 9970 | SARS-CoV-2A#33 | TTTTTCAGTGTTAGCTTGT | 57 | ACAAGCTAACACTGAAAAA | 137 | 19 | TTCGCATTCAACCAGGA | 217 | 22 |
| | | | | | | | CAGAC | | |
| 7470 | SARS-CoV-2A#32 | TCTATCACCTCAGCTGTTTT | 58 | AAAACAGCTGAGGTGATAGA | 138 | 20 | ACCAACCACCACAAACC | 218 | 17 |
| 6310 | SARS-CoV-2A#31 | TCGAATGTACAACTATTG | 59 | CAATAGTTGTACATTCGA | 139 | 18 | AGAGCAACAAGAG | 219 | 13 |
| 6262 | SARS-CoV-2A#30 | TGGATAATCTTGCCTGCGA | 60 | TCGCAGGCAAGATTATCCA | 140 | 19 | CAGAGGACGCGCAGGG | 220 | 18 |
| | | | | | | | AA | | |
| 5982 | SARS-CoV-2A#29 | TTGAAACATCAAATTCGTT | 61 | AACGAATTTGATGTTTCAA | 141 | 19 | GGAGCACAAAACCAG | 221 | 15 |
| 5966 | SARS-CoV-2A#28 | TATCCAAACGCAAGCTTCGA | 62 | TCGAAGCTTGCGTTTGGATA | 142 | 20 | ACCAAACCAACCA | 222 | 13 |
| 5942 | SARS-CoV-2A#27 | TAAAACCAGTTACTTATAAA | 63 | TTTATAAGTAACTGGTTTTA | 143 | 20 | ACACAACAACCA | 223 | 12 |
| 5839 | SARS-CoV-2A#26 | TTACACAACAACCATAAAAC | 64 | GTTTTATGGTTGTTGTGTAA | 144 | 20 | ACAAAGAAAACAG | 224 | 13 |
| 5824 | SARS-CoV-2A#25 | TTAAGGGTGTAGAAGCTGTTA | 65 | AACAGCTTCTACACCCTTAA | 145 | 20 | GGACAACAGCAGACAA | 225 | 19 |
| | | | | | | | CCC | | |
| 5487 | SARS-CoV-2A#24 | TGGTGAAGCTGCTAACTT | 66 | AAGTTAGCAGCTTCACCA | 146 | 18 | ACAGAGCAAGGGC | 226 | 13 |
| 5320 | SARS-CoV-2A#23 | TTAATGCCTGTCTGTGTGG | 67 | CCACACAGACAGGCATTAA | 147 | 19 | GCAGAAGAAACACGCA | 227 | 19 |
| | | | | | | | AA | | |
| 4365 | SARS-CoV-2A#22 | TTCTTGGAACTGTTTCTTGG | 68 | CCAAGAAACAGTTCCAAGAA | 148 | 20 | GAGAAGCAAGAAA | 228 | 13 |
| 4308 | SARS-CoV-2A#21 | TGCTTAAAAAGTGTAAAAG | 69 | CTTTTACACTTTTTAAGCA | 149 | 19 | AGAGGAGGCAAAGACA | 229 | 17 |
| | | | | | | | G | | |
| 4238 | SARS-CoV-2A#20 | TGATAAGAAAATCAAAGCTTGT | 70 | AAGCTTTGATTTTCTTATCA | 150 | 20 | GAACAGAGAAAACAAGA | 230 | 17 |
| 4181 | SARS-CoV-2A#19 | TCTTGCTAAACACTGTCTTCA | 71 | GAAGACAGTGTTTAGCAAGA | 151 | 20 | AAGCGGACACAA | 231 | 12 |
| 3888 | SARS-CoV-2A#18 | TGAGGACAATCAGACAAC | 72 | GTTGTCTGATTGTCCTCA | 152 | 18 | CAACAAGACGGCAG | 232 | 14 |
| 3536 | SARS-CoV-2A#17 | TTGGTTAGATGATGATAGTC | 73 | GACTATCATCATCTAACCAA | 153 | 20 | GAAGAAGAGCAAGAAG | 233 | 20 |
| | | | | | | | AAGA | | |
| 3189 | SARS-CoV-2A#16 | TTGAGCCATCAACTCAATA | 74 | TATTGAGTTGATGGCTCAA | 154 | 19 | GAAGAAGAAGAGT | 234 | 13 |
| 3135 | SARS-CoV-2A#15 | TTACTTTTGGTGATGACA | 75 | TGTCATCACCAAAAGTAA | 155 | 18 | GCACCAACAAAGG | 235 | 13 |
| 3030 | SARS-CoV-2A#14 | TACTGTGCCCTTGCACCTAA | 76 | TTAGGTGCAAGGGCACAGTA | 156 | 20 | CAAAGACACAGAAAAG | 236 | 16 |
| 2676 | SARS-CoV-2A#13 | TTCCCACAGAAGTGTTAACA | 77 | TGTTAACACTTCTGTGGGAA | 157 | 20 | AGAGGGAGAAACAC | 237 | 14 |
| 2600 | SARS-CoV-2A#12 | TACTGTGCCCTTGCACCTAATA | 78 | TATTAGGTGCAAGGGCACAG | 158 | 22 | CAAAAGCCCCAAAAGAA | 238 | 18 |
| | | | | TA | | | A | | |
| 2447 | SARS-CoV-2A#11 | TTCCCACAGAAGTGTTAACA | 79 | TGTTAACACTTCTGTGGGAA | 159 | 20 | AGAGGGAGAAACAC | 239 | 14 |
| 2420 | SARS-CoV-2A#10 | TTATCTTCTTAGAGGGAGAA | 80 | TTCTCCCTCTAAGAAGATAA | 160 | 20 | AAAAGCCCCAAAAGAAA | 240 | 17 |
| 2389 | SARS-CoV-2A#9 | TGGCCTACTCATGCCTCTA | 81 | TAGAGGCATGAGTAGGCCA | 161 | 19 | CCAGAGAAGAAAC | 241 | 13 |
| 1907 | SARS-CoV-2A#8 | TATAACAATACTAGATGGAATT | 82 | TTCCATCTAGTATTGTTATA | 162 | 20 | ACAGAAGGCCGC | 242 | 12 |
| 1755 | SARS-CoV-2A#7 | TAAAAAAGGTGCCTGGAA | 83 | TTCCAGGCACCTTTTTTA | 163 | 18 | ACAAAAGGAAAAGC | 243 | 14 |
| 1583 | SARS-CoV-2A#6 | TCAACATCAATATTGTTGG | 84 | CCAACAATATTGATGTTGA | 164 | 19 | CCAAAAAGAGAAAG | 244 | 14 |
| 1213 | SARS-CoV-2A#5 | TTTTGTTAAAGCCACTTGCGA | 85 | CGCAAGTGGCTTTAACAAAA | 165 | 20 | GGCAGACGGGCGA | 245 | 13 |
| 1086 | SARS-CoV-2A#4 | TTGATGGCTTTATGGGTA | 86 | TACCCATAAAGCCATCAA | 166 | 18 | GAAAAGAAAAAGC | 246 | 13 |
| 753 | SARS-CoV-2A#3 | TACACTCGCTATGTCGATAA | 87 | TTATCGACATAGCGAGTGTA | 167 | 20 | TTAACGGAGG GGCA | 247 | 15 |
| 245 | SARS-CoV-2A#2 | TCCAACTCAGTTTGCCTGT | 88 | ACAGGCAAACTGAGTTGGA | 168 | 19 | CAACGAGAAAACACAC | 248 | 18 |
| | | | | | | | G | | |
| 111 | SARS-CoV-2A#1 | TAACTCGTCTATCTTCTGCA | 89 | TGCAGAAGATAGACGAGTTA | 169 | 20 | GACAGGACAC GAG | 249 | 14 |

[0161] Alignment analysis of sequences from Table 11 was used to further evaluate the selected ID-Oligo molecules (SEQ ID NOs: 90-169), based on their location in regions that are unique and/or conserved with the target viral genome. FIG. 2 shows an alignment of the target SARS-CoV-2 genome against genomes from 7 other corona viruses (e.g., MERS, SARS-CoV-2, CoV-HKU1, CoV-OC43, CoV-NL63, and CoV-229E).

### Example 2—Human Coronavirus 229E ID-Oligo Optimization

[0162] Various Oligo-IDs designed for the detection of Human Coronavirus 229E (Human CoV-229E) are identified in Table 12 below.

TABLE 12
Human CoV-229E ID-Oligos

| Name | Sequence | SEQ ID NO: |
|---|---|---|
| HCV229E1 | GTGGAAAAAGTTCAATCCA | 251 |
| HCV229E2 | CAAAAGAAACAGGGTTAACA | 252 |
| HCV229E3 | AACTCAAAATTGGTGTTAAA | 253 |
| HCV229E4 | GTTGAACATTATTATCTAAA | 254 |
| HCV229E5 | AAGACTACGTTTTAAAACAACA | 255 |
| HCV229E6 | GCATGCCAAACAATAGGA | 256 |
| HCV229E7 | GCAACAGCATTTTCATA | 257 |
| HCV229E8 | CAAAATCAGAGGCCAAACAAGTA | 258 |
| HCV229E9 | GCCTCCATCACCTTCA | 259 |
| HCV229E10 | CTTTACACAATTGCCAACA | 260 |
| HCV229E11 | CTTTACACAATTGCCAACA | 261 |
| HCV229E12 | AAACAGAATTACGGTTTAA | 262 |
| HCV229E13 | CTTGTAAATGGTAGAATA | 263 |
| HCV229E14 | GTTTTCTCAACACACTCCAA | 264 |
| HCV229E15 | GTTTAGAAAAAATGAAGCAA | 265 |
| HCV229E16 | CCAATAGCCTATAAGCTTA | 266 |
| HCV229E17 | GTAACTTGGGTGACAAATCCA | 267 |
| HCV229E18 | GTACCCGTTTTCGCTGA | 268 |
| HCV229E19 | ACCGTGGCTTTTGCATTTCA | 269 |

[0163] The optimal mixture of ID-Oligos for use in a single reaction was determined by using analytical tools that provide information regarding self-dimerization and cross-dimerization. FIG. 3 identifies (i) HCV229E2 (SEQ ID NO:252), HCV229E5 (SEQ ID NO:255), HCV229E12 (SEQ ID NO:262), and HCV229E16 (SEQ ID NO:266) as forming self-dimers and (ii) HCV229E1 (SEQ ID NO:251) as forming a dimer with HCV229E4 (SEQ ID NO:254); HCV229E2 (SEQ ID NO:252) as forming a dimer with HCV229E3 (SEQ ID NO:253); HCV229E3 (SEQ ID NO:253) as forming dimers with HCV229E5 (SEQ ID NO:255), HCV229E7 (SEQ ID NO:257), and HCV229E14 (SEQ ID NO:264); HCV229E4 (SEQ ID NO:254) as forming a dimer with HCV229E15 (SEQ ID NO:265); HCV229E5 (SEQ ID NO:255) as forming dimers with HCV229E7 (SEQ ID NO:257) and HCV229E12 (SEQ ID NO:262); and HCV229E14 (SEQ ID NO:264) as forming a dimer with HCV229E15 (SEQ ID NO:265).

### Example 3—Detection of Synthetic Fragments of Human SARS-CoV-Urbani

[0164] To demonstrate the use of ID-Oligos (i.e., primers or oligonucleotide molecules complementary to a selected portion of a target at least partially single-stranded viral genome) to detect a target at least partially single-stranded viral genome, three synthetic fragments of the SARS-CoV-Urbani were generated (FIG. 6A). The synthetic genomes were used as the target at least partially single-stranded viral genome identified in FIG. 4. Each synthetic sequence included a uracil/thymine-free region and a target sequence for the ID-Oligo to bind. Target sequences are shown in Table 13 below.

TABLE 13
Target Sequence for ID-Oligo Binding

| Binding | | |
|---|---|---|
| Sequence | | Reverse Complement |
| Name | Sequence | of Sequence |
| SARS-C- | TTCCAAAACTGAGGAGAA | CAGATTTCTCCTCAGTTT |
| U#1 | ATCTG | TGGAA |
| | (SEQ ID NO: 270) | (SEQ ID NO: 273) |
| SARS-C- | TGTCACTAAGAAATCTGC | GCAGCAGATTTCTTAGTG |
| U#2 | TGC | AGA |
| | (SEQ ID NO: 271) | (SEQ ID NO: 274) |
| SARS-C- | TGATGAAGCTCAGCCTTT | GCAAAGGCTGAGCTTCAT |
| U#3 | GC | CA |
| | (SEQ ID NO: 272) | (SEQ ID NO: 275) |

[0165] The synthetic SARS-CoV-Urbani genome fragments were characterized, as shown in FIG. 6B. A master mix comprising His-Si-Luc (0.8 μl), ATPS (NEB, 0.8 μl), BST (DNA Polymerase, 0.8 μl, NEB), buffer (HEPES, MgCl₂, NaCl, pH7.4), luciferin (1 mM), APS (0.06 mM), and dNTP mix (0.05 mM of each dTTP, dCTP, dGTP) was combined with the synthetic genome fragments. FIG. 6C shows the luminescent signal generated by the reaction according to the methods described herein in the presence of each of the 3 synthetic genome fragments, and negative controls (reactions lacking the synthetic genome fragments). These results demonstrate the ability of ID-Oligos to detect a target at least partially single-stranded viral genome.

### Example 4—Comparison of Three Different Reverse Transcriptase Enzymes to Detect Zika Virus Genome

[0166] To evaluate the ability of different reverse transcriptase (RT) enzymes to detect a target at least partially single-stranded viral genome, 3 different RT enzymes were evaluated against RNA isolated from Zika virus. The 3 RT enzymes used were ProtoScript® II Reverse Transcriptase, M-MuLV Reverse Transcriptase, and Avian Myeloblastosis Virus (AMV) Reverse Transcriptase. ProtoScript® II Reverse Transcriptase is a recombinant M-MuLV reverse transcriptase with reduced RNase H activity and increased thermostability. It can be used to synthesize first strand cDNA at higher temperatures than the wild type M-MuLV. The enzyme is active up to 48° C., providing higher specificity, higher yield of cDNA and more full-length cDNA product up to 12 kb. The gene encoding M-MuLV Reverse Transcriptase is expressed in E. coli in a vector that results in 16 additional amino acids at the N-terminus and 13 amino acids at the C-terminus. This construct results in a fully functional Reverse Transcriptase protein with a functional RNase H domain. AMV RT is an RNA-directed DNA polymerase. This enzyme can synthesize a complementary DNA strand initiating from a primer using RNA (cDNA synthesis) or single-stranded DNA as a template.

[0167] FIG. 7A shows that the AMV RT with active RNAse-H activity demonstrated a delayed onset of the luminescence signals compared to both the ProtoScript® II and M-MuLV RT, which lack RNAse-H activity. Analysis of assay kinetics for each RT enzyme reaction revealed slightly faster rates for the ProtoScript® II RT (mutated form of the AMV RT enzyme) than the AMV RT or M-MuLV RT (FIG. 7B).

### Example 5—ID-Oligos can Distinguish Between Zika Virus and HCV Genomes

[0168] Next, whether ID-Oligos designed to complement a specific target single-stranded viral genome were selective for the target single-stranded genome was evaluated. A set of ID-Oligos specific for regions within the Zika virus genome were mixed with the assay reagents, which included His-Si-Luc (20 μl), ATPS (NEB, 1 μl), buffer (HEPES, MgCl₂, NaCl, pH7.4), luciferin (10 mM), APS (0.06 mM), dNTP mix (0.05 mM of each dTTP, dCTP, dGTP). The master mix was then added to individual wells in a 96-well microplate containing RNA from Zika virus (strain KX26887.1), Hepatitis C virus (strain JFH-1), or water, and primers designed to identify the Zika RNA. Luminescent signal was integrated every 0.4 seconds, and measured for up to 50 minutes at room temperature. The data in FIG. 8 shows that using Zika-specific ID-Oligos did not result in cross-reactivity with RNA from Hepatitis C virus. Both Zika and Hepatitis C are RNA viruses in the same viral family (Flaviviridae).

### Example 6—ID-Oligos Detect Target Single-Stranded Viral Genomes in Serum and Saliva

[0169] To determine whether ID-Oligos can be used to detect a target single-stranded viral genome in serum and saliva samples, assay reagent mixtures comprising His-Si-Luc (20 μl), ATPS (NEB, 1 μl), Klenow (1 μl, NEB), buffer (HEPES, MgCl₂, NaCl, pH7.4), luciferin (10 mM), APS (0.06 mM), dNTP mix (0.05 mM of each dTTP, dCTP, dGTP), and oligos (1 micromolar of each of 3 oligos) were prepared as a Master mix. The master mix was added to individual wells in a 96-well microplate containing ssDNA diluted in saliva or serum, and luminescence signal was measured for up to 50 minutes (at room temperature). FIG. 9 shows that the signal detected in the saliva sample was greater than that detected in the serum sample.

### Example 7—Reaction Kinetics for Detection of RNA Isolated from the Common Human Coronavirus 229E in the Presence of Various ID-Oligos

[0170] 19 different ID-Oligos were added to the reaction mixture in the presence of 0.1 pg RNA isolated from human coronavirus 229E (ATCC). The reaction mixture included His-Si-Luc (20 μl), ATPS (NEB, 1 μl), ProtoScript® II (1 NEB), buffer (HEPES, MgCl₂, NaCl, pH7.4), luciferin (10 mM), APS (0.06 mM), dNTP mix (0.05 mM of each dTTP, dCTP, dGTP), and oligos (as indicated, 1 micromolar of each). Master mix was added to individual wells in a 96-well microplate containing RNA or water (as indicated) and luminescence signal was measured for up to 50 minutes (at room temperature).

[0171] The reaction kinetics in the presence of individual ID-Oligos 1-19 (corresponding to SEQ ID NOs:251-269) are shown in FIGS. 10A-10D. Reaction kinetics in the presence of mixtures of ID-Oligos, or in the presence of a set of ID-Oligos designed to detect the Zika virus are shown in FIG. 10E. A summary of the reaction kinetics (slope) in the presence of each ID-Oligo and combinations of ID-Oligos is shown in FIG. 10F. The results in FIG. 10E illustrate the specificity of the ID-Oligos designed to detect coronavirus 229E.

### Example 8—Use of dATPαS Enables Inclusion of Oligos Targeting Non-Uracil/Thymine Free Regions in a Target Viral Genome

[0172] Whether using dATPαS in the reaction mixture would enable the inclusion of ID-Oligos designed to target non-uracil/thymine-free regions in a target viral genome was next evaluated. Structural differences between dATP and dATPαS is shown in FIG. 11A.

[0173] A master mix for 5 reactions was prepared by combining His-Si-Luc (5 μl), buffer (HEPES, MgCl₂, NaCl, pH7.4), luciferin (10 mM), APS, dNTP mix (0.06 mM of each dTTP, dCTP, dGTP), and either 0.1 mM/1 mM of dATP, 0.1 mM/1 mM of dATPαS or water. FIG. 11B shows the reduction in the LU background when using dATPαS versus dATP, which provides a significantly improved signal-to-noise ratio (˜2orders of magnitude) and thus higher overall sensitivity of the assay.

[0174] Next, a master mix for reactions was prepared by combining His-Si-Luc (5 μl), ATPS (NEB, 0.2 μl), ProtoScript® II RT (NEB, 0.2 μl), buffer (HEPES, MgCl₂, NaCl, pH7.4), luciferin (10 mM), APS (0.06 mM), dNTP mix (0.05 mM of each dTTP, dCTP, dGTP), +/−0.1 mM dATPαS, and ID-Oligos mix (ID-Oligos corresponding to SEQ ID NOs:30-48 of Table 11 (i.e., ID-Oligos having the sequence of SEQ ID NOs:110-128 of Table 11)+ID-Oligos corresponding to SEQ ID NOs:69-89 of Table 11 (i.e., ID-Oligos having the sequence of SEQ ID NOs:149-169 of Table 11). FIG. 11C shows a comparison of the reaction signal output with only dC/T/G or with dC/T/C+dATPαS. Blue bars—reaction slopes when only dT/G/C's are included. Red bars—reaction slopes when supplemented with dATPαS. Higher slope values for the reaction carried out using dATPαS indicates increased dynamic assay kinetics due to the longer polymerization reaction step by the RT.

### Example 9—Inhibitory Compounds

[0175] Compounds and reagents that inhibit or interfere with the methods described herein include Na-azide, Na-citrate, heparin, EDTA, EGTA, proteases, phosphates, 2,2′-azino-di-(3-ethylbenzothiazoline)-6-sulfonic acid (ABTS), and butylated hydroxytoluene (BHT). FIG. 12 demonstrate the inhibitory effect of Na-azide on the luminescence output of the coupled ATPS-luciferase reaction.

### Example 10—Oligo-ID Preparation/Purification

[0176] To evaluate whether ID-Oligos add any background LU due to carry over of PPi produced during their synthesis process, ID-Oligo purification via HPLC and standard desalting (salt exchange) were evaluated in comparison to non-purified ID-Oligos (control). Master mix was prepared comprising His-Si-Luc (10 μl), buffer (HEPES, MgCl₂, NaCl, pH7.4), luciferin (10 mM), ATPS (1 NEB), and APS (0.33 mM). 97 μl of master mix was added to wells (96-well microplate) containing 3 μl of 100 μM of ID-Oligos, or water (no oligo). LU was measured for up to 50 minutes. FIG. 13 demonstrates that different methods of ID-Oligo purification do not add to background luminescence.

### Example 11—Detecting Synthetic SARS-CoV-2 Using a 2-Step Oligo-ID Assay

[0177] Next, a two-step Oligo-ID assay was carried out using free-enzymes or nanoparticle-immobilized enzymes. In brief, the RT (Mu-MLV) was mixed with ID-Oligos, reagents, and RNA for an initial hybridization/polymerization step. Next, the luciferase (Luc) and ATPS were added to transduce PPi formation (by the RT) into ATP and luminescence. Master mix for 2 reactions included: His-Si-MuMLV (7 μl), buffer (HEPES, MgCl₂, NaCl, pH7.4), luciferin (10 mM), oligo (CV3-oligo, 1 μM), APS (0.33 mM), and RNA (synthetic SARS-CoV-2 (CV3, 0.3 μM) or water (“-RNA” control reaction). 88 μl of master mix was added to wells (96-well microplate), and LU was measured for 250-300 seconds (Step I). At 250/300 second, a mix of His-Si-Luc (5 μl) and His-Si-ATPS (6 μl) was added to both wells to initiate step II of the reaction. FIG. 14A shows the results of the Oligo-ID assays using free enzymes in solution. FIG. 14B shows the results of the Oligo-ID assay using enzymes attached to nanoparticles (NPs) (500 nm, SiO₂).

### Example 12—Different ATPS/RT Ratios Affect Reaction Kinetics

[0178] To determine whether different ATPS/RT rations affect reaction kinetics, a master mix for comprising increasing volumes of ATPS was prepared. The master mix comprised: His-Si-Luc (10 μl), buffer (HEPES, MgCl₂, NaCl, pH7.4), luciferin (10 mM), APS (0.33 mM), dNTP mix (0.05 mM of each dTTP, dCTP, dGTP, and dATPαS), 40× oligo mix, SARS-CoV-2 RNA (#N-52285, 1:500 dilution), Mu-MLV RT (0.2 μl NEB[200 U/μl]) and increasing volumes of ATPS (NEB [3 U/μl]). The master mix was then added to wells (96-well microplate) containing ATPS or water (no oligo) to result in the following unit ratios of ATPS/RT: 0, 0.0015, 0.003, 0.0075, 0.015, 0.03, 0.075. LU was measured for up to 50 minutes. FIG. 15 shows that optimal LU was detected at an ATPS/RT ratio of 0.03.

### Example 13—Detection of SARS-CoV-2 RNA in Saliva and Nasopharyngeal Samples

[0179] To examine whether the ID-Oligos assay could be used to detect SARS-CoV-2 RNA in saliva or nasopharyngeal samples from patients diagnosed with COVID-19, paired saliva (S) and nasopharyngeal (NP) samples were collected from patients known to have confirmed COVID-19 infection (Guthrie Medical Center, Sayre, Pa.). Viral RNA was extracted from individual samples using the MagMAX Viral/Pathogen II Nucleic Acid Isolation Kit (Applied Biosystems, CA), and eluted in water. Because the extracted RNA samples had magnetic beads carried over, a second round of cleaning was performed using the RNA Clean&Concentrate kit (Zymo Research, CA) and eluted in water. A master mix for 9 reactions was prepared, which included His-Si-Luc (5 μl), His-Si-ATPS (6 μl), His-Si-MuMLV (7 μl), buffer (HEPES, MgCl₂, NaCl, pH7.4), luciferin (10 mM), APS (0.06 mM), dNTP mix (0.05 mM of each dTTP, dCTP, dGTP, and dATPαS), and 40× oligo mix (ID-Oligos corresponding to SEQ ID NOs:30-48 of Table 11 (i.e., ID-Oligos having the sequence of SEQ ID NOs:110-128 of Table 11)+ID-Oligos corresponding to SEQ ID NOs:69-89 of Table 11 (i.e., ID-Oligos having the sequence of SEQ ID NOs:149-169 of Table 11). The master mix was added to individual 96-well microplate wells containing 0, 1, or 4 μl of saliva RNA extract, or 0, 1, 5, 10, 30 μl of nasopharyngeal (NP) RNA extract. The plate was inserted into a TECAN Infinite Pro plate reader (at 35° C.) and luminescence was integrated at intervals of 400 ms from each well continually (up to 50 minutes). FIGS. 16A-16C demonstrate that SARS-CoV-2 RNA can be detected in saliva and nasopharyngeal samples from COVID-19 patients.

### Example 14—Detection of SARS-CoV-2 RNA in Pooled Saliva

[0180] To examine whether the assay according to methods described herein could be used to detect SARS-CoV-2 RNA in a pooled saliva sample, saliva samples from patients diagnosed with COVID-19 were pooled. In brief, RNA extracted from saliva (S) of 4 donors were pooled into a single sample (collected from patients known to have confirmed COVID-19 infection (Guthrie Medical Center, Sayer Pa.). Viral RNA was extracted from individual samples using the MagMAX Viral/Pathogen II Nucleic Acid Isolation Kit (Applied Biosystems, CA), and eluted in water. Because the extracted RNA samples had magnetic beads carried over, a second round of cleaning was performed using the RNA Clean&Concentrate kit (Zymo Research, CA) and eluted in water. A master was prepared for 2 reactions. The master mix included His-Si-Luc (5 μl), His-Si-ATPS (6 μl), His-Si-MuMLV (7 μl), buffer (HEPES, MgCl₂, NaCl, pH7.4), luciferin (10 mM), APS (0.06 mM), dNTP mix (0.05 mM of each dTTP, dCTP, dGTP, and dATPαS), and 40× oligo mix (ID-Oligos corresponding to SEQ ID NOs:30-48 of Table 11 (i.e., ID-Oligos having the sequence of SEQ ID NOs:110-128 of Table 11)+ID-Oligos corresponding to SEQ ID NOs:69-89 of Table 11 (i.e., ID-Oligos having the sequence of SEQ ID NOs:149-169 of Table 11). The master mix was then added to individual 96-well microplate wells containing the pooled saliva sample, or negative control (water). The plate was inserted into a TECAN Infinite Pro plate reader (at 35° C.) and luminescence was integrated at intervals of 400 ms from each well continually (up to 50 minutes). FIG. 17 shows the change in luminescence units (LU, normalized to time point 0) over time for the pooled saliva sample as compared to a negative control.

### Example 15—Detection of SARS-CoV-2 RNA in a Nasopharyngeal (NP) Sample

[0181] To examine whether the assay according to methods described herein could detect SARS-CoV-2 RNA in nasopharyngeal (NP) samples, RNA extracted from nasopharyngeal (NP) samples collected from 1 confirmed Covid-19 positive donor (#17) and 1 confirmed negative donor (#14) Guthrie Medical Center, Sayre, Pa.) were evaluated. Viral RNA was extracted from individual samples using the MagMAX Viral/Pathogen II Nucleic Acid Isolation Kit (Applied Biosystems, CA), and eluted in water. A master mix for 2 reactions included: His-Si-Luc (5 μl), His-Si-ATPS (6 μl), His-Si-MuMLV (7 μl), buffer (HEPES, MgCl₂, NaCl, pH7.4), luciferin (10 mM), APS (0.06 mM), dNTP mix (0.05 mM of each dTTP, dCTP, dGTP, and dATPαS), and 40× oligo mix (ID-Oligos corresponding to SEQ ID NOs:30-48 of Table 11 (i.e., ID-Oligos having the sequence of SEQ ID NOs:110-128 of Table 11)+ID-Oligos corresponding to SEQ ID NOs:69-89 of Table 11 (i.e., ID-Oligos having the sequence of SEQ ID NOs:149-169 of Table 11). The master mix was then added to individual 96-well microplate wells containing the pooled saliva sample, or negative control (water). The plate was inserted into a TECAN Infinite Pro plate reader (at 35° C.) and luminescence was integrated at intervals of 400 ms from each well continually (up to 50 minutes). FIG. 18 shows the change in luminescence units (LU, normalized to time point 0) over time.

[0182] Although preferred embodiments have been depicted and described in detail herein, it will be apparent to those skilled in the relevant art that various modifications, additions, substitutions, and the like can be made without departing from the spirit of the invention and these are therefore considered to be within the scope of the invention as defined in the claims which follow.

What is claimed:

1. A method of detecting a target at least partially single-stranded viral genome in a sample, said method comprising:
providing a sample containing a target at least partially single-stranded viral genome;
providing an oligonucleotide molecule complementary to a selected portion of the target at least partially single-stranded viral genome adjacent to a single-stranded template region of the target at least partially single-stranded viral genome;
contacting the sample with the oligonucleotide molecule so that the oligonucleotide molecule hybridizes to the selected portion of the target at least partially single-stranded viral genome and forms a hybridization product comprising a double-stranded nucleic acid start portion in the viral genome at a location corresponding to the selected portion and the single-stranded template region is adjacent to the double-stranded nucleic acid start portion;
contacting the hybridization product with a polymerase and a dNTP mixture to form a polymerase extension mixture;
subjecting the polymerase extension mixture to conditions under which the hybridization product from the double-stranded nucleic acid start portion is extended by addition of nucleotides complementary to the single-stranded template region, thereby releasing free phosphates;
producing adenosine triphosphates from the released free phosphates; and
metabolizing the adenosine triphosphates produced from the free phosphates to produce a readout signal, indicating the presence of the target at least partially single-stranded viral genome in the sample.

2. The method of claim 1, wherein the single-stranded template region is a uracil/thymine-free region.

3. The method of claim 1, wherein the target at least partially single-stranded viral genome comprises RNA.

4. The method of claim 1, wherein the polymerase is a reverse transcriptase.

5. The method of claim 4, wherein the reverse transcriptase is selected from the group consisting of Protoscript® II Reverse Transcriptase (Protoscript® II RT), Maloney Murine Leukemia Virus Reverse Transcriptase (M-MuLV RT), and Avian Myeloblastosis Virus Reverse Transcriptase (AMV RT).

6. The method of claim 1, wherein the target at least partially single-stranded viral genome comprises DNA.

7. The method of claim 1, wherein the polymerase is a DNA polymerase.

8. The method of claim 1, wherein the polymerase is coupled to a solid support.

9. The method of claim 8, wherein the polymerase is coupled to the solid support with a linker selected from the group consisting of His-Si, His, Si, biotin, streptavidin, Pt, Au, Ag, His-Pt, His-Au, His-Ag, GST, an antibody, and an epitope tag.

10. The method of claim 1, wherein luciferase metabolizes the adenosine triphosphates to produce a readout signal that is a bioluminescent readout signal.

11. The method of claim 10, wherein the luciferase is coupled to a solid support.

12. The method of claim 11, wherein the luciferase is coupled to the solid support with a linker selected from the group consisting of His-Si, His, Si, biotin, streptavidin, Pt, Au, Ag, His-Pt, His-Au, His-Ag, GST, an antibody, and an epitope tag.

13. The method of claim 1, wherein said producing adenosine triphosphates comprises:
subjecting the released free phosphates to a coupled glyceraldehyde 3-phosphate dehydrogenase-phosphoglycerate kinase enzymatic reaction to produce adenosine triphosphate.

14. The method of claim 13, wherein said subjecting the released free phosphates to a coupled glyceraldehyde 3-phosphate dehydrogenase-phosphoglycerate kinase enzymatic reaction comprises:
contacting adenosine diphosphate, nicotinamide adenine dinucleotide and glyceraldehyde 3-phosphate to achieve the coupled glyceraldehyde 3-phosphate dehydrogenase-phosphoglycerate kinase enzymatic reaction.

15. The method of claim 14, wherein the glyceraldehyde 3-phosphate dehydrogenase and the phosphoglycerate kinase are coupled to a solid support.

16. The method of claim 1, wherein said producing adenosine triphosphates comprises:
contacting the released free phosphates with adenosine 5′-phosphosulfate in the presence of adenosine triphosphate sulfurylase to produce adenosine triphosphate.

17. The method of claim 16, wherein the adenosine triphosphate sulfurylase is coupled to a solid support.

18. The method of claim 1, wherein the target at least partially single-stranded viral genome is from a virus selected from the group consisting of Severe Acute Respiratory Syndrome Coronavirus 2 (SARS-CoV-2), Severe Acute Respiratory Syndrome Coronavirus Urbani (SARS-CoV-Urbani), Middle East Respiratory Syndrome Coronavirus (MERS-CoV), Yellow Fever virus, Dengue virus 1, Dengue virus 2, Dengue virus 3, Dengue virus 4, Japanese Encephalitis virus, West Nile virus, Zika virus, Hepatitis C virus, Chikungunya virus, Ross River virus, Sindbis virus, Rubella virus, Norwalk virus, Coxsackievirus, Enterovirus, Rhinovirus, Poliovirus, Ebola virus, Lassa virus, Marburg virus, Hendravirus, Nipavirus, Newcastle disease virus, Parainfluenza virus, Mumps virus, Measles virus, Rabies virus, Human respiratory syncytial virus, Human parvovirus B19, Foot-and-mouth disease virus, Vesicular stomatitis virus, Human Immunodeficiency virus, Influenzavirus, and Hepatitis A virus.

19. The method of claim 1 further comprising:
quantifying the readout signal to determine the presence and/or concentration of the target at least partially single-stranded viral genome in the sample.

20. The method of claim 19, wherein the presence of the target at least partially single-stranded viral genome in the sample is determined.

21. The method of claim 20, wherein the presence of the target at least partially single-stranded viral genome in the sample is determined by a procedure comprising:
calculating an initial rate of readout signal production;
calculating what time period is needed to achieve peak readout signal; and
calculating peak readout signal amplitude or integrated readout signal from time zero to peak readout signal.

22. The method of claim 21 further comprising:
comparing the readout signal to that of a control reaction that lacks the target at least partially single-stranded viral genome.

23. The method of claim 19, wherein the concentration of the target at least partially single-stranded viral genome in the sample is determined.

24. The method of claim 1 or claim 2, wherein the polymerase extension mixture is substantially free of unmodified deoxyadenosine triphosphate (dATP).

25. The method of claim 24, wherein the polymerase extension mixture comprises 2′-Deoxyadenosine-5-(α-thio)-triphosphate, Sodium salt (dATPαS).

26. The method of claim 1, wherein the polymerase extension mixture is substantially free of modified or unmodified forms of dATP.

27. The method of claim 1, wherein the sample is selected from the group consisting of blood, a blood product, plasma, serum, urine, cerebrospinal fluid, saliva, sputum, mucus/cells from nasopharyngeal, oropharyngeal, or nasal-mid-turbinate swabs, tissue, and a synthetic material.

28. The method of claim 1, wherein the method is carried out in solution.

29. The method of claim 1, wherein multiple oligonucleotide molecules are provided for hybridizing to different complementary portions of the target at least partially single-stranded viral genome adjacent to different single-stranded template regions of the target at least partially single-stranded viral genome.

30. The method of claim 29, wherein the different single-stranded template regions are uracil/thymine-free regions.

31. The method of claim 1, wherein the target at least partially single-stranded viral genome is single-stranded.

32. The method of claim 1, wherein the target at least partially single-stranded viral genome is partially single-stranded.

33. The method of claim 1, wherein said providing a sample containing a target at least partially single-stranded viral genome comprises:
collecting the sample from a human, non-human primate, cat, dog, ferret, pig, goat, sheep, cattle, chicken, turkey, duck, camelid, reptile, tiger, bat, pangolin, or amphibian.

34. The method of claim 1, wherein said providing a sample containing a target at least partially single-stranded viral genome comprises:
collecting the sample ex vivo from a surface, material, or inanimate object.

35. A kit for detecting a target at least partially single-stranded viral genome in a sample, said kit comprising:
a polymerase;
a dNTP mixture;
one or more enzymes for producing adenosine triphosphates from released free phosphates; and
a luciferase for producing a bioluminescent readout signal.

36. The kit of claim 35 further comprising one or more oligonucleotide molecules complementary to a selected portion of a target at least partially single-stranded viral genome adjacent to a single-stranded template region of the target at least partially single-stranded viral genome.

37. The kit of claim 36, wherein the single-stranded template region is a uracil/thymine-free region.

38. The kit of claim 36 or claim 37, wherein the kit comprises multiple oligonucleotide molecules for hybridizing to different complementary portions of the target at least partially single-stranded viral genome adjacent to different single-stranded template regions of the target at least partially single-stranded viral genome.

39. The kit of any one of claims 35-38, wherein the different single-stranded template regions are uracil/thymine-free regions.

40. The kit of any one of claims 35-39 further comprising:
a solid support coupled to said polymerase.

41. The kit of any one of claims 35-40 further comprising:
a solid support coupled to said luciferase.

42. The kit of any one of claims 35-41 further comprising:
a solid support coupled to said one or more enzyme(s) for producing adenosine triphosphates from released free phosphates.

43. The kit of claim 35 or claim 26, wherein the polymerase is a reverse transcriptase.

44. The kit of claim 35 or claim 36, wherein the polymerase is a DNA polymerase.

45. The kit of claim 35 or claim 36, wherein the target at least partially single-stranded viral genome is from a virus selected from the group consisting of Severe Acute Respiratory Syndrome Coronavirus 2 (SARS-CoV-2), Severe Acute Respiratory Syndrome Coronavirus Urbani (SARS-CoV-Urbani), Middle East Respiratory Syndrome Coronavirus (MERS-CoV), Yellow Fever virus, Dengue virus 1, Dengue virus 2, Dengue virus 3, Dengue virus 4, Japanese Encephalitis virus, West Nile virus, Zika virus, Hepatitis C virus, Chikungunya virus, Ross River virus, Sindbis virus, Rubella virus, Norwalk virus, Coxsackievirus, Enterovirus, Rhinovirus, Poliovirus, Ebola virus, Lassa virus, Marburg virus, Hendravirus, Nipavirus, Newcastle disease virus, Parainfluenza virus, Mumps virus, Measles virus, Rabies virus, Human respiratory syncytial virus, Human parvovirus B19, Foot-and-mouth disease virus, Vesicular stomatitis virus, Human Immunodeficiency virus, Influenzavirus, and Hepatitis A virus.

46. The kit of any one of claims 35-45, further comprising a microfluidic device.

47. A reaction mixture comprising:
a target at least partially single-stranded viral genome;
one or more oligonucleotide molecules, each oligonucleotide molecule complementary to a selected portion of the target at least partially single-stranded viral genome adjacent to a single-stranded template region of the target at least partially single-stranded viral genome;
a hybridization product comprising a double-stranded nucleic acid start portion in the viral genome at a location corresponding to the selected portion and the single-stranded template region is adjacent to the double-stranded nucleic acid start portion;
a polymerase; and
a dNTP mixture that is substantially free of an unmodified form of dATP.

48. The reaction mixture of claim 47, wherein the single-stranded template region is a uracil/thymine-free region.

49. The reaction mixture of claim 47, wherein the dNTP mixture comprises dATPαS.

50. The reaction mixture of claim 47, wherein the dNTP mixture is substantially free of modified or unmodified forms of dATP.

51. The reaction mixture of claim 47 further comprising:
free phosphates.

52. The reaction mixture of claim 47 further comprising:
glyceraldehyde 3-phosphate dehydrogenase and phosphoglycerate kinase.

53. The reaction mixture of claim 47 further comprising:
a luciferase.

54. A method of treating a human, said method comprising:
obtaining a sample from a human;
determining a presence or an absence of at least a portion of a single-stranded viral genome in the sample by one or more of the methods of claims 1-34; and
treating the human based on the presence or absence of at least a portion of the single-stranded genome in the sample.

55. A method of treating a non-human subject, said method comprising:
obtaining a sample from a non-human subject;
determining a presence or an absence of at least a portion of a single-stranded viral genome in the sample by one or more of the methods of claims 1-34; and
treating the non-human subject based on the presence or absence of at least a portion of the single-stranded genome in the sample.

The application's sequence listing, which the Patent Office published only in electronic form, follows.

SEQUENCE LISTING (302 sequences)

SEQ ID NO: 1 - DNA, 29903 bp, Artificial Sequence
  SARS-CoV2 isolate Wuhan-Hu-1
attaaaggtttataccttcccaggtaacaaaccaaccaactttcgatctcttgtagatctgttctctaaacgaactttaaaatctgtgtggctgtcactcggctgcatgcttagtgcactcacgcagtataattaataactaattactgtcgttgacaggacacgagtaactcgtctatcttctgcaggctgcttacggtttcgtccgtgttgcagccgatcatcagcacatctaggtttcgtccgggtgtgaccgaaaggtaagatggagagccttgtccctggtttcaacgagaaaacacacgtccaactcagtttgcctgttttacaggttcgcgacgtgctcgtacgtggctttggagactccgtggaggaggtcttatcagaggcacgtcaacatcttaaagatggcacttgtggcttagtagaagttgaaaaaggcgttttgcctcaacttgaacagccctatgtgttcatcaaacgttcggatgctcgaactgcacctcatggtcatgttatggttgagctggtagcagaactcgaaggcattcagtacggtcgtagtggtgagacacttggtgtccttgtccctcatgtgggcgaaataccagtggcttaccgcaaggttcttcttcgtaagaacggtaataaaggagctggtggccatagttacggcgccgatctaaagtcatttgacttaggcgacgagcttggcactgatccttatgaagattttcaagaaaactggaacactaaacatagcagtggtgttacccgtgaactcatgcgtgagcttaacggaggggcatacactcgctatgtcgataacaacttctgtggccctgatggctaccctcttgagtgcattaaagaccttctagcacgtgctggtaaagcttcatgcactttgtccgaacaactggactttattgacactaagaggggtgtatactgctgccgtgaacatgagcatgaaattgcttggtacacggaacgttctgaaaagagctatgaattgcagacaccttttgaaattaaattggcaaagaaatttgacaccttcaatggggaatgtccaaattttgtatttcccttaaattccataatcaagactattcaaccaagggttgaaaagaaaaagcttgatggctttatgggtagaattcgatctgtctatccagttgcgtcaccaaatgaatgcaaccaaatgtgcctttcaactctcatgaagtgtgatcattgtggtgaaacttcatggcagacgggcgattttgttaaagccacttgcgaattttgtggcactgagaatttgactaaagaaggtgccactacttgtggttacttaccccaaaatgctgttgttaaaatttattgtccagcatgtcacaattcagaagtaggacctgagcatagtcttgccgaataccataatgaatctggcttgaaaaccattcttcgtaagggtggtcgcactattgcctttggaggctgtgtgttctcttatgttggttgccataacaagtgtgcctattgggttccacgtgctagcgctaacataggttgtaaccatacaggtgttgttggagaaggttccgaaggtcttaatgacaaccttcttgaaatactccaaaaagagaaagtcaacatcaatattgttggtgactttaaacttaatgaagagatcgccattattttggcatctttttctgcttccacaagtgcttttgtggaaactgtgaaaggtttggattataaagcattcaaacaaattgttgaatcctgtggtaattttaaagttacaaaaggaaaagctaaaaaaggtgcctggaatattggtgaacagaaatcaatactgagtcctctttatgcatttgcatcagaggctgctcgtgttgtacgatcaattttctcccgcactcttgaaactgctcaaaattctgtgcgtgttttacagaaggccgctataacaatactagatggaatttcacagtattcactgagactcattgatgctatgatgttcacatctgatttggctactaacaatctagttgtaatggcctacattacaggtggtgttgttcagttgacttcgcagtggctaactaacatctttggcactgtttatgaaaaactcaaacccgtccttgattggcttgaagagaagtttaaggaaggtgtagagtttcttagagacggttgggaaattgttaaatttatctcaacctgtgcttgtgaaattgtcggtggacaaattgtcacctgtgcaaaggaaattaaggagagtgttcagacattctttaagcttgtaaataaatttttggctttgtgtgctgactctatcattattggtggagctaaacttaaagccttgaatttaggtgaaacatttgtcacgcactcaaagggattgtacagaaagtgtgttaaatccagagaagaaactggcctactcatgcctctaaaagccccaaaagaaattatcttcttagagggagaaacacttcccacagaagtgttaacagaggaagttgtcttgaaaactggtgatttacaaccattagaacaacctactagtgaagctgttgaagctccattggttggtacaccagtttgtattaacgggcttatgttgctcgaaatcaaagacacagaaaagtactgtgcccttgcacctaatatgatggtaacaaacaataccttcacactcaaaggcggtgcaccaacaaaggttacttttggtgatgacactgtgatagaagtgcaaggttacaagagtgtgaatatcacttttgaacttgatgaaaggattgataaagtacttaatgagaagtgctctgcctatacagttgaactcggtacagaagtaaatgagttcgcctgtgttgtggcagatgctgtcataaaaactttgcaaccagtatctgaattacttacaccactgggcattgatttagatgagtggagtatggctacatactacttatttgatgagtctggtgagtttaaattggcttcacatatgtattgttctttctaccctccagatgaggatgaagaagaaggtgattgtgaagaagaagagtttgagccatcaactcaatatgagtatggtactgaagatgattaccaaggtaaacctttggaatttggtgccacttctgctgctcttcaacctgaagaagagcaagaagaagattggttagatgatgatagtcaacaaactgttggtcaacaagacggcagtgaggacaatcagacaactactattcaaacaattgttgaggttcaacctcaattagagatggaacttacaccagttgttcagactattgaagtgaatagttttagtggttatttaaaacttactgacaatgtatacattaaaaatgcagacattgtggaagaagctaaaaaggtaaaaccaacagtggttgttaatgcagccaatgtttaccttaaacatggaggaggtgttgcaggagccttaaataaggctactaacaatgccatgcaagttgaatctgatgattacatagctactaatggaccacttaaagtgggtggtagttgtgttttaagcggacacaatcttgctaaacactgtcttcatgttgtcggcccaaatgttaacaaaggtgaagacattcaacttcttaagagtgcttatgaaaattttaatcagcacgaagttctacttgcaccattattatcagctggtatttttggtgctgaccctatacattctttaagagtttgtgtagatactgttcgcacaaatgtctacttagctgtctttgataaaaatctctatgacaaacttgtttcaagctttttggaaatgaagagtgaaaagcaagttgaacaaaagatcgctgagattcctaaagaggaagttaagccatttataactgaaagtaaaccttcagttgaacagagaaaacaagatgataagaaaatcaaagcttgtgttgaagaagttacaacaactctggaagaaactaagttcctcacagaaaacttgttactttatattgacattaatggcaatcttcatccagattctgccactcttgttagtgacattgacatcactttcttaaagaaagatgctccatatatagtgggtgatgttgttcaagagggtgttttaactgctgtggttatacctactaaaaaggctggtggcactactgaaatgctagcgaaagctttgagaaaagtgccaacagacaattatataaccacttacccgggtcagggtttaaatggttacactgtagaggaggcaaagacagtgcttaaaaagtgtaaaagtgccttttacattctaccatctattatctctaatgagaagcaagaaattcttggaactgtttcttggaatttgcgagaaatgcttgcacatgcagaagaaacacgcaaattaatgcctgtctgtgtggaaactaaagccatagtttcaactatacagcgtaaatataagggtattaaaatacaagagggtgtggttgattatggtgctagattttacttttacaccagtaaaacaactgtagcgtcacttatcaacacacttaacgatctaaatgaaactcttgttacaatgccacttggctatgtaacacatggcttaaatttggaagaagctgctcggtatatgagatctctcaaagtgccagctacagtttctgtttcttcacctgatgctgttacagcgtataatggttatcttacttcttcttctaaaacacctgaagaacattttattgaaaccatctcacttgctggttcctataaagattggtcctattctggacaatctacacaactaggtatagaatttcttaagagaggtgataaaagtgtatattacactagtaatcctaccacattccacctagatggtgaagttatcacctttgacaatcttaagacacttctttctttgagagaagtgaggactattaaggtgtttacaacagtagacaacattaacctccacacgcaagttgtggacatgtcaatgacatatggacaacagtttggtccaacttatttggatggagctgatgttactaaaataaaacctcataattcacatgaaggtaaaacattttatgttttacctaatgatgacactctacgtgttgaggcttttgagtactaccacacaactgatcctagttttctgggtaggtacatgtcagcattaaatcacactaaaaagtggaaatacccacaagttaatggtttaacttctattaaatgggcagataacaactgttatcttgccactgcattgttaacactccaacaaatagagttgaagtttaatccacctgctctacaagatgcttattacagagcaagggctggtgaagctgctaacttttgtgcacttatcttagcctactgtaataagacagtaggtgagttaggtgatgttagagaaacaatgagttacttgtttcaacatgccaatttagattcttgcaaaagagtcttgaacgtggtgtgtaaaacttgtggacaacagcagacaacccttaagggtgtagaagctgttatgtacatgggcacactttcttatgaacaatttaagaaaggtgttcagataccttgtacgtgtggtaaacaagctacaaaatatctagtacaacaggagtcaccttttgttatgatgtcagcaccacctgctcagtatgaacttaagcatggtacatttacttgtgctagtgagtacactggtaattaccagtgtggtcactataaacatataacttctaaagaaactttgtattgcatagacggtgctttacttacaaagtcctcagaatacaaaggtcctattacggatgttttctacaaagaaaacagttacacaacaaccataaaaccagttacttataaattggatggtgttgtttgtacagaaattgaccctaagttggacaattattataagaaagacaattcttatttcacagagcaaccaattgatcttgtaccaaaccaaccatatccaaacgcaagcttcgataattttaagtttgtatgtgataatatcaaatttgctgatgatttaaaccagttaactggttataagaaacctgcttcaagagagcttaaagttacatttttccctgacttaaatggtgatgtggtggctattgattataaacactacacaccctcttttaagaaaggagctaaattgttacataaacctattgtttggcatgttaacaatgcaactaataaagccacgtataaaccaaatacctggtgtatacgttgtctttggagcacaaaaccagttgaaacatcaaattcgtttgatgtactgaagtcagaggacgcgcagggaatggataatcttgcctgcgaagatctaaaaccagtctctgaagaagtagtggaaaatcctaccatacagaaagacgttcttgagtgtaatgtgaaaactaccgaagttgtaggagacattatacttaaaccagcaaataatagtttaaaaattacagaagaggttggccacacagatctaatggctgcttatgtagacaattctagtcttactattaagaaacctaatgaattatctagagtattaggtttgaaaacccttgctactcatggtttagctgctgttaatagtgtcccttgggatactatagctaattatgctaagccttttcttaacaaagttgttagtacaactactaacatagttacacggtgtttaaaccgtgtttgtactaattatatgccttatttctttactttattgctacaattgtgtacttttactagaagtacaaattctagaattaaagcatctatgccgactactatagcaaagaatactgttaagagtgtcggtaaattttgtctagaggcttcatttaattatttgaagtcacctaatttttctaaactgataaatattataatttggtttttactattaagtgtttgcctaggttctttaatctactcaaccgctgctttaggtgttttaatgtctaatttaggcatgccttcttactgtactggttacagagaaggctatttgaactctactaatgtcactattgcaacctactgtactggttctataccttgtagtgtttgtcttagtggtttagattctttagacacctatccttctttagaaactatacaaattaccatttcatcttttaaatgggatttaactgcttttggcttagttgcagagtggtttttggcatatattcttttcactaggtttttctatgtacttggattggctgcaatcatgcaattgtttttcagctattttgcagtacattttattagtaattcttggcttatgtggttaataattaatcttgtacaaatggccccgatttcagctatggttagaatgtacatcttctttgcatcattttattatgtatggaaaagttatgtgcatgttgtagacggttgtaattcatcaacttgtatgatgtgttacaaacgtaatagagcaacaagagtcgaatgtacaactattgttaatggtgttagaaggtccttttatgtctatgctaatggaggtaaaggcttttgcaaactacacaattggaattgtgttaattgtgatacattctgtgctggtagtacatttattagtgatgaagttgcgagagacttgtcactacagtttaaaagaccaataaatcctactgaccagtcttcttacatcgttgatagtgttacagtgaagaatggttccatccatctttactttgataaagctggtcaaaagacttatgaaagacattctctctctcattttgttaacttagacaacctgagagctaataacactaaaggttcattgcctattaatgttatagtttttgatggtaaatcaaaatgtgaagaatcatctgcaaaatcagcgtctgtttactacagtcagcttatgtgtcaacctatactgttactagatcaggcattagtgtctgatgttggtgatagtgcggaagttgcagttaaaatgtttgatgcttacgttaatacgttttcatcaacttttaacgtaccaatggaaaaactcaaaacactagttgcaactgcagaagctgaacttgcaaagaatgtgtccttagacaatgtcttatctacttttatttcagcagctcggcaagggtttgttgattcagatgtagaaactaaagatgttgttgaatgtcttaaattgtcacatcaatctgacatagaagttactggcgatagttgtaataactatatgctcacctataacaaagttgaaaacatgacaccccgtgaccttggtgcttgtattgactgtagtgcgcgtcatattaatgcgcaggtagcaaaaagtcacaacattgctttgatatggaacgttaaagatttcatgtcattgtctgaacaactacgaaaacaaatacgtagtgctgctaaaaagaataacttaccttttaagttgacatgtgcaactactagacaagttgttaatgttgtaacaacaaagatagcacttaagggtggtaaaattgttaataattggttgaagcagttaattaaagttacacttgtgttcctttttgttgctgctattttctatttaataacacctgttcatgtcatgtctaaacatactgacttttcaagtgaaatcataggatacaaggctattgatggtggtgtcactcgtgacatagcatctacagatacttgttttgctaacaaacatgctgattttgacacatggtttagccagcgtggtggtagttatactaatgacaaagcttgcccattgattgctgcagtcataacaagagaagtgggttttgtcgtgcctggtttgcctggcacgatattacgcacaactaatggtgactttttgcatttcttacctagagtttttagtgcagttggtaacatctgttacacaccatcaaaacttatagagtacactgactttgcaacatcagcttgtgttttggctgctgaatgtacaatttttaaagatgcttctggtaagccagtaccatattgttatgataccaatgtactagaaggttctgttgcttatgaaagtttacgccctgacacacgttatgtgctcatggatggctctattattcaatttcctaacacctaccttgaaggttctgttagagtggtaacaacttttgattctgagtactgtaggcacggcacttgtgaaagatcagaagctggtgtttgtgtatctactagtggtagatgggtacttaacaatgattattacagatctttaccaggagttttctgtggtgtagatgctgtaaatttacttactaatatgtttacaccactaattcaacctattggtgctttggacatatcagcatctatagtagctggtggtattgtagctatcgtagtaacatgccttgcctactattttatgaggtttagaagagcttttggtgaatacagtcatgtagttgcctttaatactttactattccttatgtcattcactgtactctgtttaacaccagtttactcattcttacctggtgtttattctgttatttacttgtacttgacattttatcttactaatgatgtttcttttttagcacatattcagtggatggttatgttcacacctttagtacctttctggataacaattgcttatatcatttgtatttccacaaagcatttctattggttctttagtaattacctaaagagacgtgtagtctttaatggtgtttcctttagtacttttgaagaagctgcgctgtgcacctttttgttaaataaagaaatgtatctaaagttgcgtagtgatgtgctattacctcttacgcaatataatagatacttagctctttataataagtacaagtattttagtggagcaatggatacaactagctacagagaagctgcttgttgtcatctcgcaaaggctctcaatgacttcagtaactcaggttctgatgttctttaccaaccaccacaaacctctatcacctcagctgttttgcagagtggttttagaaaaatggcattcccatctggtaaagttgagggttgtatggtacaagtaacttgtggtacaactacacttaacggtctttggcttgatgacgtagtttactgtccaagacatgtgatctgcacctctgaagacatgcttaaccctaattatgaagatttactcattcgtaagtctaatcataatttcttggtacaggctggtaatgttcaactcagggttattggacattctatgcaaaattgtgtacttaagcttaaggttgatacagccaatcctaagacacctaagtataagtttgttcgcattcaaccaggacagactttttcagtgttagcttgttacaatggttcaccatctggtgtttaccaatgtgctatgaggcccaatttcactattaagggttcattccttaatggttcatgtggtagtgttggttttaacatagattatgactgtgtctctttttgttacatgcaccatatggaattaccaactggagttcatgctggcacagacttagaaggtaacttttatggaccttttgttgacaggcaaacagcacaagcagctggtacggacacaactattacagttaatgttttagcttggttgtacgctgctgttataaatggagacaggtggtttctcaatcgatttaccacaactcttaatgactttaaccttgtggctatgaagtacaattatgaacctctaacacaagaccatgttgacatactaggacctctttctgctcaaactggaattgccgttttagatatgtgtgcttcattaaaagaattactgcaaaatggtatgaatggacgtaccatattgggtagtgctttattagaagatgaatttacaccttttgatgttgttagacaatgctcaggtgttactttccaaagtgcagtgaaaagaacaatcaagggtacacaccactggttgttactcacaattttgacttcacttttagttttagtccagagtactcaatggtctttgttcttttttttgtatgaaaatgcctttttaccttttgctatgggtattattgctatgtctgcttttgcaatgatgtttgtcaaacataagcatgcatttctctgtttgtttttgttaccttctcttgccactgtagcttattttaatatggtctatatgcctgctagttgggtgatgcgtattatgacatggttggatatggttgatactagtttgtctggttttaagctaaaagactgtgttatgtatgcatcagctgtagtgttactaatccttatgacagcaagaactgtgtatgatgatggtgctaggagagtgtggacacttatgaatgtcttgacactcgtttataaagtttattatggtaatgctttagatcaagccatttccatgtgggctcttataatctctgttacttctaactactcaggtgtagttacaactgtcatgtttttggccagaggtattgtttttatgtgtgttgagtattgccctattttcttcataactggtaatacacttcagtgtataatgctagtttattgtttcttaggctatttttgtacttgttactttggcctcttttgtttactcaaccgctactttagactgactcttggtgtttatgattacttagtttctacacaggagtttagatatatgaattcacagggactactcccacccaagaatagcatagatgccttcaaactcaacattaaattgttgggtgttggtggcaaaccttgtatcaaagtagccactgtacagtctaaaatgtcagatgtaaagtgcacatcagtagtcttactctcagttttgcaacaactcagagtagaatcatcatctaaattgtgggctcaatgtgtccagttacacaatgacattctcttagctaaagatactactgaagcctttgaaaaaatggtttcactactttctgttttgctttccatgcagggtgctgtagacataaacaagctttgtgaagaaatgctggacaacagggcaaccttacaagctatagcctcagagtttagttcccttccatcatatgcagcttttgctactgctcaagaagcttatgagcaggctgttgctaatggtgattctgaagttgttcttaaaaagttgaagaagtctttgaatgtggctaaatctgaatttgaccgtgatgcagccatgcaacgtaagttggaaaagatggctgatcaagctatgacccaaatgtataaacaggctagatctgaggacaagagggcaaaagttactagtgctatgcagacaatgcttttcactatgcttagaaagttggataatgatgcactcaacaacattatcaacaatgcaagagatggttgtgttcccttgaacataatacctcttacaacagcagccaaactaatggttgtcataccagactataacacatataaaaatacgtgtgatggtacaacatttacttatgcatcagcattgtgggaaatccaacaggttgtagatgcagatagtaaaattgttcaacttagtgaaattagtatggacaattcacctaatttagcatggcctcttattgtaacagctttaagggccaattctgctgtcaaattacagaataatgagcttagtcctgttgcactacgacagatgtcttgtgctgccggtactacacaaactgcttgcactgatgacaatgcgttagcttactacaacacaacaaagggaggtaggtttgtacttgcactgttatccgatttacaggatttgaaatgggctagattccctaagagtgatggaactggtactatctatacagaactggaaccaccttgtaggtttgttacagacacacctaaaggtcctaaagtgaagtatttatactttattaaaggattaaacaacctaaatagaggtatggtacttggtagtttagctgccacagtacgtctacaagctggtaatgcaacagaagtgcctgccaattcaactgtattatctttctgtgcttttgctgtagatgctgctaaagcttacaaagattatctagctagtgggggacaaccaatcactaattgtgttaagatgttgtgtacacacactggtactggtcaggcaataacagttacaccggaagccaatatggatcaagaatcctttggtggtgcatcgtgttgtctgtactgccgttgccacatagatcatccaaatcctaaaggattttgtgacttaaaaggtaagtatgtacaaatacctacaacttgtgctaatgaccctgtgggttttacacttaaaaacacagtctgtaccgtctgcggtatgtggaaaggttatggctgtagttgtgatcaactccgcgaacccatgcttcagtcagctgatgcacaatcgtttttaaacgggtttgcggtgtaagtgcagcccgtcttacaccgtgcggcacaggcactagtactgatgtcgtatacagggcttttgacatctacaatgataaagtagctggttttgctaaattcctaaaaactaattgttgtcgcttccaagaaaaggacgaagatgacaatttaattgattcttactttgtagttaagagacacactttctctaactaccaacatgaagaaacaatttataatttacttaaggattgtccagctgttgctaaacatgacttctttaagtttagaatagacggtgacatggtaccacatatatcacgtcaacgtcttactaaatacacaatggcagacctcgtctatgctttaaggcattttgatgaaggtaattgtgacacattaaaagaaatacttgtcacatacaattgttgtgatgatgattatttcaataaaaaggactggtatgattttgtagaaaacccagatatattacgcgtatacgccaacttaggtgaacgtgtacgccaagctttgttaaaaacagtacaattctgtgatgccatgcgaaatgctggtattgttggtgtactgacattagataatcaagatctcaatggtaactggtatgatttcggtgatttcatacaaaccacgccaggtagtggagttcctgttgtagattcttattattcattgttaatgcctatattaaccttgaccagggctttaactgcagagtcacatgttgacactgacttaacaaagccttacattaagtgggatttgttaaaatatgacttcacggaagagaggttaaaactctttgaccgttattttaaatattgggatcagacataccacccaaattgtgttaactgtttggatgacagatgcattctgcattgtgcaaactttaatgttttattctctacagtgttcccacctacaagttttggaccactagtgagaaaaatatttgttgatggtgttccatttgtagtttcaactggataccacttcagagagctaggtgttgtacataatcaggatgtaaacttacatagctctagacttagttttaaggaattacttgtgtatgctgctgaccctgctatgcacgctgcttctggtaatctattactagataaacgcactacgtgcttttcagtagctgcacttactaacaatgttgcttttcaaactgtcaaacccggtaattttaacaaagacttctatgactttgctgtgtctaagggtttctttaaggaaggaagttctgttgaattaaaacacttcttctttgctcaggatggtaatgctgctatcagcgattatgactactatcgttataatctaccaacaatgtgtgatatcagacaactactatttgtagttgaagttgttgataagtactttgattgttacgatggtggctgtattaatgctaaccaagtcatcgtcaacaacctagacaaatcagctggttttccatttaataaatggggtaaggctagactttattatgattcaatgagttatgaggatcaagatgcacttttcgcatatacaaaacgtaatgtcatccctactataactcaaatgaatcttaagtatgccattagtgcaaagaatagagctcgcaccgtagctggtgtctctatctgtagtactatgaccaatagacagtttcatcaaaaattattgaaatcaatagccgccactagaggagctactgtagtaattggaacaagcaaattctatggtggttggcacaacatgttaaaaactgtttatagtgatgtagaaaaccctcaccttatgggttgggattatcctaaatgtgatagagccatgcctaacatgcttagaattatggcctcacttgttcttgctcgcaaacatacaacgtgttgtagcttgtcacaccgtttctatagattagctaatgagtgtgctcaagtattgagtgaaatggtcatgtgtggcggttcactatatgttaaaccaggtggaacctcatcaggagatgccacaactgcttatgctaatagtgtttttaacatttgtcaagctgtcacggccaatgttaatgcacttttatctactgatggtaacaaaattgccgataagtatgtccgcaatttacaacacagactttatgagtgtctctatagaaatagagatgttgacacagactttgtgaatgagttttacgcatatttgcgtaaacatttctcaatgatgatactctctgacgatgctgttgtgtgtttcaatagcacttatgcatctcaaggtctagtggctagcataaagaactttaagtcagttctttattatcaaaacaatgtttttatgtctgaagcaaaatgttggactgagactgaccttactaaaggacctcatgaattttgctctcaacatacaatgctagttaaacagggtgatgattatgtgtaccttccttacccagatccatcaagaatcctaggggccggctgttttgtagatgatatcgtaaaaacagatggtacacttatgattgaacggttcgtgtctttagctatagatgcttacccacttactaaacatcctaatcaggagtatgctgatgtctttcatttgtacttacaatacataagaaagctacatgatgagttaacaggacacatgttagacatgtattctgttatgcttactaatgataacacttcaaggtattgggaacctgagttttatgaggctatgtacacaccgcatacagtcttacaggctgttggggcttgtgttctttgcaattcacagacttcattaagatgtggtgcttgcatacgtagaccattcttatgttgtaaatgctgttacgaccatgtcatatcaacatcacataaattagtcttgtctgttaatccgtatgtttgcaatgctccaggttgtgatgtcacagatgtgactcaactttacttaggaggtatgagctattattgtaaatcacataaaccacccattagttttccattgtgtgctaatggacaagtttttggtttatataaaaatacatgtgttggtagcgataatgttactgactttaatgcaattgcaacatgtgactggacaaatgctggtgattacattttagctaacacctgtactgaaagactcaagctttttgcagcagaaacgctcaaagctactgaggagacatttaaactgtcttatggtattgctactgtacgtgaagtgctgtctgacagagaattacatctttcatgggaagttggtaaacctagaccaccacttaaccgaaattatgtctttactggttatcgtgtaactaaaaacagtaaagtacaaataggagagtacacctttgaaaaaggtgactatggtgatgctgttgtttaccgaggtacaacaacttacaaattaaatgttggtgattattttgtgctgacatcacatacagtaatgccattaagtgcacctacactagtgccacaagagcactatgttagaattactggcttatacccaacactcaatatctcagatgagttttctagcaatgttgcaaattatcaaaaggttggtatgcaaaagtattctacactccagggaccacctggtactggtaagagtcattttgctattggcctagctctctactacccttctgctcgcatagtgtatacagcttgctctcatgccgctgttgatgcactatgtgagaaggcattaaaatatttgcctatagataaatgtagtagaattatacctgcacgtgctcgtgtagagtgttttgataaattcaaagtgaattcaacattagaacagtatgtcttttgtactgtaaatgcattgcctgagacgacagcagatatagttgtctttgatgaaatttcaatggccacaaattatgatttgagtgttgtcaatgccagattacgtgctaagcactatgtgtacattggcgaccctgctcaattacctgcaccacgcacattgctaactaagggcacactagaaccagaatatttcaattcagtgtgtagacttatgaaaactataggtccagacatgttcctcggaacttgtcggcgttgtcctgctgaaattgttgacactgtgagtgctttggtttatgataataagcttaaagcacataaagacaaatcagctcaatgctttaaaatgttttataagggtgttatcacgcatgatgtttcatctgcaattaacaggccacaaataggcgtggtaagagaattccttacacgtaaccctgcttggagaaaagctgtctttatttcaccttataattcacagaatgctgtagcctcaaagattttgggactaccaactcaaactgttgattcatcacagggctcagaatatgactatgtcatattcactcaaaccactgaaacagctcactcttgtaatgtaaacagatttaatgttgctattaccagagcaaaagtaggcatactttgcataatgtctgatagagacctttatgacaagttgcaatttacaagtcttgaaattccacgtaggaatgtggcaactttacaagctgaaaatgtaacaggactctttaaagattgtagtaaggtaatcactgggttacatcctacacaggcacctacacacctcagtgttgacactaaattcaaaactgaaggtttatgtgttgacatacctggcatacctaaggacatgacctatagaagactcatctctatgatgggttttaaaatgaattatcaagttaatggttaccctaacatgtttatcacccgcgaagaagctataagacatgtacgtgcatggattggcttcgatgtcgaggggtgtcatgctactagagaagctgttggtaccaatttacctttacagctaggtttttctacaggtgttaacctagttgctgtacctacaggttatgttgatacacctaataatacagatttttccagagttagtgctaaaccaccgcctggagatcaatttaaacacctcataccacttatgtacaaaggacttccttggaatgtagtgcgtataaagattgtacaaatgttaagtgacacacttaaaaatctctctgacagagtcgtatttgtcttatgggcacatggctttgagttgacatctatgaagtattttgtgaaaataggacctgagcgcacctgttgtctatgtgatagacgtgccacatgcttttccactgcttcagacacttatgcctgttggcatcattctattggatttgattacgtctataatccgtttatgattgatgttcaacaatggggttttacaggtaacctacaaagcaaccatgatctgtattgtcaagtccatggtaatgcacatgtagctagttgtgatgcaatcatgactaggtgtctagctgtccacgagtgctttgttaagcgtgttgactggactattgaatatcctataattggtgatgaactgaagattaatgcggcttgtagaaaggttcaacacatggttgttaaagctgcattattagcagacaaattcccagttcttcacgacattggtaaccctaaagctattaagtgtgtacctcaagctgatgtagaatggaagttctatgatgcacagccttgtagtgacaaagcttataaaatagaagaattattctattcttatgccacacattctgacaaattcacagatggtgtatgcctattttggaattgcaatgtcgatagatatcctgctaattccattgtttgtagatttgacactagagtgctatctaaccttaacttgcctggttgtgatggtggcagtttgtatgtaaataaacatgcattccacacaccagcttttgataaaagtgcttttgttaatttaaaacaattaccatttttctattactctgacagtccatgtgagtctcatggaaaacaagtagtgtcagatatagattatgtaccactaaagtctgctacgtgtataacacgttgcaatttaggtggtgctgtctgtagacatcatgctaatgagtacagattgtatctcgatgcttataacatgatgatctcagctggctttagcttgtgggtttacaaacaatttgatacttataacctctggaacacttttacaagacttcagagtttagaaaatgtggcttttaatgttgtaaataagggacactttgatggacaacagggtgaagtaccagtttctatcattaataacactgtttacacaaaagttgatggtgttgatgtagaattgtttgaaaataaaacaacattacctgttaatgtagcatttgagctttgggctaagcgcaacattaaaccagtaccagaggtgaaaatactcaataatttgggtgtggacattgctgctaatactgtgatctgggactacaaaagagatgctccagcacatatatctactattggtgtttgttctatgactgacatagccaagaaaccaactgaaacgatttgtgcaccactcactgtcttttttgatggtagagttgatggtcaagtagacttatttagaaatgcccgtaatggtgttcttattacagaaggtagtgttaaaggtttacaaccatctgtaggtcccaaacaagctagtcttaatggagtcacattaattggagaagccgtaaaaacacagttcaattattataagaaagttgatggtgttgtccaacaattacctgaaacttactttactcagagtagaaatttacaagaatttaaacccaggagtcaaatggaaattgatttcttagaattagctatggatgaattcattgaacggtataaattagaaggctatgccttcgaacatatcgtttatggagattttagtcatagtcagttaggtggtttacatctactgattggactagctaaacgttttaaggaatcaccttttgaattagaagattttattcctatggacagtacagttaaaaactatttcataacagatgcgcaaacaggttcatctaagtgtgtgtgttctgttattgatttattacttgatgattttgttgaaataataaaatcccaagatttatctgtagtttctaaggttgtcaaagtgactattgactatacagaaatttcatttatgctttggtgtaaagatggccatgtagaaacattttacccaaaattacaatctagtcaagcgtggcaaccgggtgttgctatgcctaatctttacaaaatgcaaagaatgctattagaaaagtgtgaccttcaaaattatggtgatagtgcaacattacctaaaggcataatgatgaatgtcgcaaaatatactcaactgtgtcaatatttaaacacattaacattagctgtaccctataatatgagagttatacattttggtgctggttctgataaaggagttgcaccaggtacagctgttttaagacagtggttgcctacgggtacgctgcttgtcgattcagatcttaatgactttgtctctgatgcagattcaactttgattggtgattgtgcaactgtacatacagctaataaatgggatctcattattagtgatatgtacgaccctaagactaaaaatgttacaaaagaaaatgactctaaagagggttttttcacttacatttgtgggtttatacaacaaaagctagctcttggaggttccgtggctataaagataacagaacattcttggaatgctgatctttataagctcatgggacacttcgcatggtggacagcctttgttactaatgtgaatgcgtcatcatctgaagcatttttaattggatgtaattatcttggcaaaccacgcgaacaaatagatggttatgtcatgcatgcaaattacatattttggaggaatacaaatccaattcagttgtcttcctattctttatttgacatgagtaaatttccccttaaattaaggggtactgctgttatgtctttaaaagaaggtcaaatcaatgatatgattttatctcttcttagtaaaggtagacttataattagagaaaacaacagagttgttatttctagtgatgttcttgttaacaactaaacgaacaatgtttgtttttcttgttttattgccactagtctctagtcagtgtgttaatcttacaaccagaactcaattaccccctgcatacactaattctttcacacgtggtgtttattaccctgacaaagttttcagatcctcagttttacattcaactcaggacttgttcttacctttcttttccaatgttacttggttccatgctatacatgtctctgggaccaatggtactaagaggtttgataaccctgtcctaccatttaatgatggtgtttattttgcttccactgagaagtctaacataataagaggctggatttttggtactactttagattcgaagacccagtccctacttattgttaataacgctactaatgttgttattaaagtctgtgaatttcaattttgtaatgatccatttttgggtgtttattaccacaaaaacaacaaaagttggatggaaagtgagttcagagtttattctagtgcgaataattgcacttttgaatatgtctctcagccttttcttatggaccttgaaggaaaacagggtaatttcaaaaatcttagggaatttgtgtttaagaatattgatggttattttaaaatatattctaagcacacgcctattaatttagtgcgtgatctccctcagggtttttcggctttagaaccattggtagatttgccaataggtattaacatcactaggtttcaaactttacttgctttacatagaagttatttgactcctggtgattcttcttcaggttggacagctggtgctgcagcttattatgtgggttatcttcaacctaggacttttctattaaaatataatgaaaatggaaccattacagatgctgtagactgtgcacttgaccctctctcagaaacaaagtgtacgttgaaatccttcactgtagaaaaaggaatctatcaaacttctaactttagagtccaaccaacagaatctattgttagatttcctaatattacaaacttgtgcccttttggtgaagtttttaacgccaccagatttgcatctgtttatgcttggaacaggaagagaatcagcaactgtgttgctgattattctgtcctatataattccgcatcattttccacttttaagtgttatggagtgtctcctactaaattaaatgatctctgctttactaatgtctatgcagattcatttgtaattagaggtgatgaagtcagacaaatcgctccagggcaaactggaaagattgctgattataattataaattaccagatgattttacaggctgcgttatagcttggaattctaacaatcttgattctaaggttggtggtaattataattacctgtatagattgtttaggaagtctaatctcaaaccttttgagagagatatttcaactgaaatctatcaggccggtagcacaccttgtaatggtgttgaaggttttaattgttactttcctttacaatcatatggtttccaacccactaatggtgttggttaccaaccatacagagtagtagtactttcttttgaacttctacatgcaccagcaactgtttgtggacctaaaaagtctactaatttggttaaaaacaaatgtgtcaatttcaacttcaatggtttaacaggcacaggtgttcttactgagtctaacaaaaagtttctgcctttccaacaatttggcagagacattgctgacactactgatgctgtccgtgatccacagacacttgagattcttgacattacaccatgttcttttggtggtgtcagtgttataacaccaggaacaaatacttctaaccaggttgctgttctttatcaggatgttaactgcacagaagtccctgttgctattcatgcagatcaacttactcctacttggcgtgtttattctacaggttctaatgtttttcaaacacgtgcaggctgtttaataggggctgaacatgtcaacaactcatatgagtgtgacatacccattggtgcaggtatatgcgctagttatcagactcagactaattctcctcggcgggcacgtagtgtagctagtcaatccatcattgcctacactatgtcacttggtgcagaaaattcagttgcttactctaataactctattgccatacccacaaattttactattagtgttaccacagaaattctaccagtgtctatgaccaagacatcagtagattgtacaatgtacatttgtggtgattcaactgaatgcagcaatcttttgttgcaatatggcagtttttgtacacaattaaaccgtgctttaactggaatagctgttgaacaagacaaaaacacccaagaagtttttgcacaagtcaaacaaatttacaaaacaccaccaattaaagattttggtggttttaatttttcacaaatattaccagatccatcaaaaccaagcaagaggtcatttattgaagatctacttttcaacaaagtgacacttgcagatgctggcttcatcaaacaatatggtgattgccttggtgatattgctgctagagacctcatttgtgcacaaaagtttaacggccttactgttttgccacctttgctcacagatgaaatgattgctcaatacacttctgcactgttagcgggtacaatcacttctggttggacctttggtgcaggtgctgcattacaaataccatttgctatgcaaatggcttataggtttaatggtattggagttacacagaatgttctctatgagaaccaaaaattgattgccaaccaatttaatagtgctattggcaaaattcaagactcactttcttccacagcaagtgcacttggaaaacttcaagatgtggtcaaccaaaatgcacaagctttaaacacgcttgttaaacaacttagctccaattttggtgcaatttcaagtgttttaaatgatatcctttcacgtcttgacaaagttgaggctgaagtgcaaattgataggttgatcacaggcagacttcaaagtttgcagacatatgtgactcaacaattaattagagctgcagaaatcagagcttctgctaatcttgctgctactaaaatgtcagagtgtgtacttggacaatcaaaaagagttgatttttgtggaaagggctatcatcttatgtccttccctcagtcagcacctcatggtgtagtcttcttgcatgtgacttatgtccctgcacaagaaaagaacttcacaactgctcctgccatttgtcatgatggaaaagcacactttcctcgtgaaggtgtctttgtttcaaatggcacacactggtttgtaacacaaaggaatttttatgaaccacaaatcattactacagacaacacatttgtgtctggtaactgtgatgttgtaataggaattgtcaacaacacagtttatgatcctttgcaacctgaattagactcattcaaggaggagttagataaatattttaagaatcatacatcaccagatgttgatttaggtgacatctctggcattaatgcttcagttgtaaacattcaaaaagaaattgaccgcctcaatgaggttgccaagaatttaaatgaatctctcatcgatctccaagaacttggaaagtatgagcagtatataaaatggccatggtacatttggctaggttttatagctggcttgattgccatagtaatggtgacaattatgctttgctgtatgaccagttgctgtagttgtctcaagggctgttgttcttgtggatcctgctgcaaatttgatgaagacgactctgagccagtgctcaaaggagtcaaattacattacacataaacgaacttatggatttgtttatgagaatcttcacaattggaactgtaactttgaagcaaggtgaaatcaaggatgctactccttcagattttgttcgcgctactgcaacgataccgatacaagcctcactccctttcggatggcttattgttggcgttgcacttcttgctgtttttcagagcgcttccaaaatcataaccctcaaaaagagatggcaactagcactctccaagggtgttcactttgtttgcaacttgctgttgttgtttgtaacagtttactcacaccttttgctcgttgctgctggccttgaagccccttttctctatctttatgctttagtctacttcttgcagagtataaactttgtaagaataataatgaggctttggctttgctggaaatgccgttccaaaaacccattactttatgatgccaactattttctttgctggcatactaattgttacgactattgtataccttacaatagtgtaacttcttcaattgtcattacttcaggtgatggcacaacaagtcctatttctgaacatgactaccagattggtggttatactgaaaaatgggaatctggagtaaaagactgtgttgtattacacagttacttcacttcagactattaccagctgtactcaactcaattgagtacagacactggtgttgaacatgttaccttcttcatctacaataaaattgttgatgagcctgaagaacatgtccaaattcacacaatcgacggttcatccggagttgttaatccagtaatggaaccaatttatgatgaaccgacgacgactactagcgtgcctttgtaagcacaagctgatgagtacgaacttatgtactcattcgtttcggaagagacaggtacgttaatagttaatagcgtacttctttttcttgctttcgtggtattcttgctagttacactagccatccttactgcgcttcgattgtgtgcgtactgctgcaatattgttaacgtgagtcttgtaaaaccttctttttacgtttactctcgtgttaaaaatctgaattcttctagagttcctgatcttctggtctaaacgaactaaatattatattagtttttctgtttggaactttaattttagccatggcagattccaacggtactattaccgttgaagagcttaaaaagctccttgaacaatggaacctagtaataggtttcctattccttacatggatttgtcttctacaatttgcctatgccaacaggaataggtttttgtatataattaagttaattttcctctggctgttatggccagtaactttagcttgttttgtgcttgctgctgtttacagaataaattggatcaccggtggaattgctatcgcaatggcttgtcttgtaggcttgatgtggctcagctacttcattgcttctttcagactgtttgcgcgtacgcgttccatgtggtcattcaatccagaaactaacattcttctcaacgtgccactccatggcactattctgaccagaccgcttctagaaagtgaactcgtaatcggagctgtgatccttcgtggacatcttcgtattgctggacaccatctaggacgctgtgacatcaaggacctgcctaaagaaatcactgttgctacatcacgaacgctttcttattacaaattgggagcttcgcagcgtgtagcaggtgactcaggttttgctgcatacagtcgctacaggattggcaactataaattaaacacagaccattccagtagcagtgacaatattgctttgcttgtacagtaagtgacaacagatgtttcatctcgttgactttcaggttactatagcagagatattactaattattatgaggacttttaaagtttccatttggaatcttgattacatcataaacctcataattaaaaatttatctaagtcactaactgagaataaatattctcaattagatgaagagcaaccaatggagattgattaaacgaacatgaaaattattcttttcttggcactgataacactcgctacttgtgagctttatcactaccaagagtgtgttagaggtacaacagtacttttaaaagaaccttgctcttctggaacatacgagggcaattcaccatttcatcctctagctgataacaaatttgcactgacttgctttagcactcaatttgcttttgcttgtcctgacggcgtaaaacacgtctatcagttacgtgccagatcagtttcacctaaactgttcatcagacaagaggaagttcaagaactttactctccaatttttcttattgttgcggcaatagtgtttataacactttgcttcacactcaaaagaaagacagaatgattgaactttcattaattgacttctatttgtgctttttagcctttctgctattccttgttttaattatgcttattatcttttggttctcacttgaactgcaagatcataatgaaacttgtcacgcctaaacgaacatgaaatttcttgttttcttaggaatcatcacaactgtagctgcatttcaccaagaatgtagtttacagtcatgtactcaacatcaaccatatgtagttgatgacccgtgtcctattcacttctattctaaatggtatattagagtaggagctagaaaatcagcacctttaattgaattgtgcgtggatgaggctggttctaaatcacccattcagtacatcgatatcggtaattatacagtttcctgtttaccttttacaattaattgccaggaacctaaattgggtagtcttgtagtgcgttgttcgttctatgaagactttttagagtatcatgacgttcgtgttgttttagatttcatctaaacgaacaaactaaaatgtctgataatggaccccaaaatcagcgaaatgcaccccgcattacgtttggtggaccctcagattcaactggcagtaaccagaatggagaacgcagtggggcgcgatcaaaacaacgtcggccccaaggtttacccaataatactgcgtcttggttcaccgctctcactcaacatggcaaggaagaccttaaattccctcgaggacaaggcgttccaattaacaccaatagcagtccagatgaccaaattggctactaccgaagagctaccagacgaattcgtggtggtgacggtaaaatgaaagatctcagtccaagatggtatttctactacctaggaactgggccagaagctggacttccctatggtgctaacaaagacggcatcatatgggttgcaactgagggagccttgaatacaccaaaagatcacattggcacccgcaatcctgctaacaatgctgcaatcgtgctacaacttcctcaaggaacaacattgccaaaaggcttctacgcagaagggagcagaggcggcagtcaagcctcttctcgttcctcatcacgtagtcgcaacagttcaagaaattcaactccaggcagcagtaggggaacttctcctgctagaatggctggcaatggcggtgatgctgctcttgctttgctgctgcttgacagattgaaccagcttgagagcaaaatgtctggtaaaggccaacaacaacaaggccaaactgtcactaagaaatctgctgctgaggcttctaagaagcctcggcaaaaacgtactgccactaaagcatacaatgtaacacaagctttcggcagacgtggtccagaacaaacccaaggaaattttggggaccaggaactaatcagacaaggaactgattacaaacattggccgcaaattgcacaatttgcccccagcgcttcagcgttcttcggaatgtcgcgcattggcatggaagtcacaccttcgggaacgtggttgacctacacaggtgccatcaaattggatgacaaagatccaaatttcaaagatcaagtcattttgctgaataagcatattgacgcatacaaaacattcccaccaacagagcctaaaaaggacaaaaagaagaaggctgatgaaactcaagccttaccgcagagacagaagaaacagcaaactgtgactcttcttcctgctgcagatttggatgatttctccaaacaattgcaacaatccatgagcagtgctgactcaactcaggcctaaactcatgcagaccacacaaggcagatgggctatataaacgttttcgcttttccgtttacgatatatagtctactcttgtgcagaatgaattctcgtaactacatagcacaagtagatgtagttaactttaatctcacatagcaatctttaatcagtgtgtaacattagggaggacttgaaagagccaccacattttcaccgaggccacgcggagtacgatcgagtgtacagtgaacaatgctagggagagctgcctatatggaagagccctaatgtgtaaaattaattttagtagtgctatccccatgtgattttaatagcttcttaggagaatgacaaaaaaaaaaaaaaaaaaaaaaaaaaaaaaaaa

SEQ ID NO: 2 - DNA, 29727 bp, Artificial Sequence
  SARS-CoV Urbani
atattaggtttttacctacccaggaaaagccaaccaacctcgatctcttgtagatctgttctctaaacgaactttaaaatctgtgtagctgtcgctcggctgcatgcctagtgcacctacgcagtataaacaataataaattttactgtcgttgacaagaaacgagtaactcgtccctcttctgcagactgcttacggtttcgtccgtgttgcagtcgatcatcagcatacctaggtttcgtccgggtgtgaccgaaaggtaagatggagagccttgttcttggtgtcaacgagaaaacacacgtccaactcagtttgcctgtccttcaggttagagacgtgctagtgcgtggcttcggggactctgtggaagaggccctatcggaggcacgtgaacacctcaaaaatggcacttgtggtctagtagagctggaaaaaggcgtactgccccagcttgaacagccctatgtgttcattaaacgttctgatgccttaagcaccaatcacggccacaaggtcgttgagctggttgcagaaatggacggcattcagtacggtcgtagcggtataacactgggagtactcgtgccacatgtgggcgaaaccccaattgcataccgcaatgttcttcttcgtaagaacggtaataagggagccggtggtcatagctatggcatcgatctaaagtcttatgacttaggtgacgagcttggcactgatcccattgaagattatgaacaaaactggaacactaagcatggcagtggtgcactccgtgaactcactcgtgagctcaatggaggtgcagtcactcgctatgtcgacaacaatttctgtggcccagatgggtaccctcttgattgcatcaaagattttctcgcacgcgcgggcaagtcaatgtgcactctttccgaacaacttgattacatcgagtcgaagagaggtgtctactgctgccgtgaccatgagcatgaaattgcctggttcactgagcgctctgataagagctacgagcaccagacacccttcgaaattaagagtgccaagaaatttgacactttcaaaggggaatgcccaaagtttgtgtttcctcttaactcaaaagtcaaagtcattcaaccacgtgttgaaaagaaaaagactgagggtttcatggggcgtatacgctctgtgtaccctgttgcatctccacaggagtgtaacaatatgcacttgtctaccttgatgaaatgtaatcattgcgatgaagtttcatggcagacgtgcgactttctgaaagccacttgtgaacattgtggcactgaaaatttagttattgaaggacctactacatgtgggtacctacctactaatgctgtagtgaaaatgccatgtcctgcctgtcaagacccagagattggacctgagcatagtgttgcagattatcacaaccactcaaacattgaaactcgactccgcaagggaggtaggactagatgttttggaggctgtgtgtttgcctatgttggctgctataataagcgtgcctactgggttcctcgtgctagtgctgatattggctcaggccatactggcattactggtgacaatgtggagaccttgaatgaggatctccttgagatactgagtcgtgaacgtgttaacattaacattgttggcgattttcatttgaatgaagaggttgccatcattttggcatctttctctgcttctacaagtgcctttattgacactataaagagtcttgattacaagtctttcaaaaccattgttgagtcctgcggtaactataaagttaccaagggaaagcccgtaaaaggtgcttggaacattggacaacagagatcagttttaacaccactgtgtggttttccctcacaggctgctggtgttatcagatcaatttttgcgcgcacacttgatgcagcaaaccactcaattcctgatttgcaaagagcagctgtcaccatacttgatggtatttctgaacagtcattacgtcttgtcgacgccatggtttatacttcagacctgctcaccaacagtgtcattattatggcatatgtaactggtggtcttgtacaacagacttctcagtggttgtctaatcttttgggcactactgttgaaaaactcaggcctatctttgaatggattgaggcgaaacttagtgcaggagttgaatttctcaaggatgcttgggagattctcaaatttctcattacaggtgtttttgacatcgtcaagggtcaaatacaggttgcttcagataacatcaaggattgtgtaaaatgcttcattgatgttgttaacaaggcactcgaaatgtgcattgatcaagtcactatcgctggcgcaaagttgcgatcactcaacttaggtgaagtcttcatcgctcaaagcaagggactttaccgtcagtgtatacgtggcaaggagcagctgcaactactcatgcctcttaaggcaccaaaagaagtaacctttcttgaaggtgattcacatgacacagtacttacctctgaggaggttgttctcaagaacggtgaactcgaagcactcgagacgcccgttgatagcttcacaaatggagctatcgttggcacaccagtctgtgtaaatggcctcatgctcttagagattaaggacaaagaacaatactgcgcattgtctcctggtttactggctacaaacaatgtctttcgcttaaaagggggtgcaccaattaaaggtgtaacctttggagaagatactgtttgggaagttcaaggttacaagaatgtgagaatcacatttgagcttgatgaacgtgttgacaaagtgcttaatgaaaagtgctctgtctacactgttgaatccggtaccgaagttactgagtttgcatgtgttgtagcagaggctgttgtgaagactttacaaccagtttctgatctccttaccaacatgggtattgatcttgatgagtggagtgtagctacattctacttatttgatgatgctggtgaagaaaacttttcatcacgtatgtattgttccttttaccctccagatgaggaagaagaggacgatgcagagtgtgaggaagaagaaattgatgaaacctgtgaacatgagtacggtacagaggatgattatcaaggtctccctctggaatttggtgcctcagctgaaacagttcgagttgaggaagaagaagaggaagactggctggatgatactactgagcaatcagagattgagccagaaccagaacctacacctgaagaaccagttaatcagtttactggttatttaaaacttactgacaatgttgccattaaatgtgttgacatcgttaaggaggcacaaagtgctaatcctatggtgattgtaaatgctgctaacatacacctgaaacatggtggtggtgtagcaggtgcactcaacaaggcaaccaatggtgccatgcaaaaggagagtgatgattacattaagctaaatggccctcttacagtaggagggtcttgtttgctttctggacataatcttgctaagaagtgtctgcatgttgttggacctaacctaaatgcaggtgaggacatccagcttcttaaggcagcatatgaaaatttcaattcacaggacatcttacttgcaccattgttgtcagcaggcatatttggtgctaaaccacttcagtctttacaagtgtgcgtgcagacggttcgtacacaggtttatattgcagtcaatgacaaagctctttatgagcaggttgtcatggattatcttgataacctgaagcctagagtggaagcacctaaacaagaggagccaccaaacacagaagattccaaaactgaggagaaatctgtcgtacagaagcctgtcgatgtgaagccaaaaattaaggcctgcattgatgaggttaccacaacactggaagaaactaagtttcttaccaataagttactcttgtttgctgatatcaatggtaagctttaccatgattctcagaacatgcttagaggtgaagatatgtctttccttgagaaggatgcaccttacatggtaggtgatgttatcactagtggtgatatcacttgtgttgtaataccctccaaaaaggctggtggcactactgagatgctctcaagagctttgaagaaagtgccagttgatgagtatataaccacgtaccctggacaaggatgtgctggttatacacttgaggaagctaagactgctcttaagaaatgcaaatctgcattttatgtactaccttcagaagcacctaatgctaaggaagagattctaggaactgtatcctggaatttgagagaaatgcttgctcatgctgaagagacaagaaaattaatgcctatatgcatggatgttagagccataatggcaaccatccaacgtaagtataaaggaattaaaattcaagagggcatcgttgactatggtgtccgattcttcttttatactagtaaagagcctgtagcttctattattacgaagctgaactctctaaatgagccgcttgtcacaatgccaattggttatgtgacacatggttttaatcttgaagaggctgcgcgctgtatgcgttctcttaaagctcctgccgtagtgtcagtatcatcaccagatgctgttactacatataatggatacctcacttcgtcatcaaagacatctgaggagcactttgtagaaacagtttctttggctggctcttacagagattggtcctattcaggacagcgtacagagttaggtgttgaatttcttaagcgtggtgacaaaattgtgtaccacactctggagagccccgtcgagtttcatcttgacggtgaggttctttcacttgacaaactaaagagtctcttatccctgcgggaggttaagactataaaagtgttcacaactgtggacaacactaatctccacacacagcttgtggatatgtctatgacatatggacagcagtttggtccaacatacttggatggtgctgatgttacaaaaattaaacctcatgtaaatcatgagggtaagactttctttgtactacctagtgatgacacactacgtagtgaagctttcgagtactaccatactcttgatgagagttttcttggtaggtacatgtctgctttaaaccacacaaagaaatggaaatttcctcaagttggtggtttaacttcaattaaatgggctgataacaattgttatttgtctagtgttttattagcacttcaacagcttgaagtcaaattcaatgcaccagcacttcaagaggcttattatagagcccgtgctggtgatgctgctaacttttgtgcactcatactcgcttacagtaataaaactgttggcgagcttggtgatgtcagagaaactatgacccatcttctacagcatgctaatttggaatctgcaaagcgagttcttaatgtggtgtgtaaacattgtggtcagaaaactactaccttaacgggtgtagaagctgtgatgtatatgggtactctatcttatgataatcttaagacaggtgtttccattccatgtgtgtgtggtcgtgatgctacacaatatctagtacaacaagagtcttcttttgttatgatgtctgcaccacctgctgagtataaattacagcaaggtacattcttatgtgcgaatgagtacactggtaactatcagtgtggtcattacactcatataactgctaaggagaccctctatcgtattgacggagctcaccttacaaagatgtcagagtacaaaggaccagtgactgatgttttctacaaggaaacatcttacactacaaccatcaagcctgtgtcgtataaactcgatggagttacttacacagagattgaaccaaaattggatgggtattataaaaaggataatgcttactatacagagcagcctatagaccttgtaccaactcaaccattaccaaatgcgagttttgataatttcaaactcacatgttctaacacaaaatttgctgatgatttaaatcaaatgacaggcttcacaaagccagcttcacgagagctatctgtcacattcttcccagacttgaatggcgatgtagtggctattgactatagacactattcagcgagtttcaagaaaggtgctaaattactgcataagccaattgtttggcacattaaccaggctacaaccaagacaacgttcaaaccaaacacttggtgtttacgttgtctttggagtacaaagccagtagatacttcaaattcatttgaagttctggcagtagaagacacacaaggaatggacaatcttgcttgtgaaagtcaacaacccacctctgaagaagtagtggaaaatcctaccatacagaaggaagtcatagagtgtgacgtgaaaactaccgaagttgtaggcaatgtcatacttaaaccatcagatgaaggtgttaaagtaacacaagagttaggtcatgaggatcttatggctgcttatgtggaaaacacaagcattaccattaagaaacctaatgagctttcactagccttaggtttaaaaacaattgccactcatggtattgctgcaattaatagtgttccttggagtaaaattttggcttatgtcaaaccattcttaggacaagcagcaattacaacatcaaattgcgctaagagattagcacaacgtgtgtttaacaattatatgccttatgtgtttacattattgttccaattgtgtacttttactaaaagtaccaattctagaattagagcttcactacctacaactattgctaaaaatagtgttaagagtgttgctaaattatgtttggatgccggcattaattatgtgaagtcacccaaattttctaaattgttcacaatcgctatgtggctattgttgttaagtatttgcttaggttctctaatctgtgtaactgctgcttttggtgtactcttatctaattttggtgctccttcttattgtaatggcgttagagaattgtatcttaattcgtctaacgttactactatggatttctgtgaaggttcttttccttgcagcatttgtttaagtggattagactcccttgattcttatccagctcttgaaaccattcaggtgacgatttcatcgtacaagctagacttgacaattttaggtctggccgctgagtgggttttggcatatatgttgttcacaaaattcttttatttattaggtctttcagctataatgcaggtgttctttggctattttgctagtcatttcatcagcaattcttggctcatgtggtttatcattagtattgtacaaatggcacccgtttctgcaatggttaggatgtacatcttctttgcttctttctactacatatggaagagctatgttcatatcatggatggttgcacctcttcgacttgcatgatgtgctataagcgcaatcgtgccacacgcgttgagtgtacaactattgttaatggcatgaagagatctttctatgtctatgcaaatggaggccgtggcttctgcaagactcacaattggaattgtctcaattgtgacacattttgcactggtagtacattcattagtgatgaagttgctcgtgatttgtcactccagtttaaaagaccaatcaaccctactgaccagtcatcgtatattgttgatagtgttgctgtgaaaaatggcgcgcttcacctctactttgacaaggctggtcaaaagacctatgagagacatccgctctcccattttgtcaatttagacaatttgagagctaacaacactaaaggttcactgcctattaatgtcatagtttttgatggcaagtccaaatgcgacgagtctgcttctaagtctgcttctgtgtactacagtcagctgatgtgccaacctattctgttgcttgaccaagttcttgtatcagacgttggagatagtactgaagtttccgttaagatgtttgatgcttatgtcgacaccttttcagcaacttttagtgttcctatggaaaaacttaaggcacttgttgctacagctcacagcgagttagcaaagggtgtagctttagatggtgtcctttctacattcgtgtcagctgcccgacaaggtgttgttgataccgatgttgacacaaaggatgttattgaatgtctcaaactttcacatcactctgacttagaagtgacaggtgacagttgtaacaatttcatgctcacctataataaggttgaaaacatgacgcccagagatcttggcgcatgtattgactgtaatgcaaggcatatcaatgcccaagtagcaaaaagtcacaatgtttcactcatctggaatgtaaaagactacatgtctttatctgaacagctgcgtaaacaaattcgtagtgctgccaagaagaacaacataccttttagactaacttgtgctacaactagacaggttgtcaatgtcataactactaaaatctcactcaagggtggtaagattgttagtacttgttttaaacttatgcttaaggccacattattgtgcgttcttgctgcattggtttgttatatcgttatgccagtacatacattgtcaatccatgatggttacacaaatgaaatcattggttacaaagccattcaggatggtgtcactcgtgacatcatttctactgatgattgttttgcaaataaacatgctggttttgacgcatggtttagccagcgtggtggttcatacaaaaatgacaaaagctgccctgtagtagctgctatcattacaagagagattggtttcatagtgcctggcttaccgggtactgtgctgagagcaatcaatggtgacttcttgcattttctacctcgtgtttttagtgctgttggcaacatttgctacacaccttccaaactcattgagtatagtgattttgctacctctgcttgcgttcttgctgctgagtgtacaatttttaaggatgctatgggcaaacctgtgccatattgttatgacactaatttgctagagggttctatttcttatagtgagcttcgtccagacactcgttatgtgcttatggatggttccatcatacagtttcctaacacttacctggagggttctgttagagtagtaacaacttttgatgctgagtactgtagacatggtacatgcgaaaggtcagaagtaggtatttgcctatctaccagtggtagatgggttcttaataatgagcattacagagctctatcaggagttttctgtggtgttgatgcgatgaatctcatagctaacatctttactcctcttgtgcaacctgtgggtgctttagatgtgtctgcttcagtagtggctggtggtattattgccatattggtgacttgtgctgcctactactttatgaaattcagacgtgtttttggtgagtacaaccatgttgttgctgctaatgcacttttgtttttgatgtctttcactatactctgtctggtaccagcttacagctttctgccgggagtctactcagtcttttacttgtacttgacattctatttcaccaatgatgtttcattcttggctcaccttcaatggtttgccatgttttctcctattgtgcctttttggataacagcaatctatgtattctgtatttctctgaagcactgccattggttctttaacaactatcttaggaaaagagtcatgtttaatggagttacatttagtaccttcgaggaggctgctttgtgtacctttttgctcaacaaggaaatgtacctaaaattgcgtagcgagacactgttgccacttacacagtataacaggtatcttgctctatataacaagtacaagtatttcagtggagccttagatactaccagctatcgtgaagcagcttgctgccacttagcaaaggctctaaatgactttagcaactcaggtgctgatgttctctaccaaccaccacagacatcaatcacttctgctgttctgcagagtggttttaggaaaatggcattcccgtcaggcaaagttgaagggtgcatggtacaagtaacctgtggaactacaactcttaatggattgtggttggatgacacagtatactgtccaagacatgtcatttgcacagcagaagacatgcttaatcctaactatgaagatctgctcattcgcaaatccaaccatagctttcttgttcaggctggcaatgttcaacttcgtgttattggccattctatgcaaaattgtctgcttaggcttaaagttgatacttctaaccctaagacacccaagtataaatttgtccgtatccaacctggtcaaacattttcagttctagcatgctacaatggttcaccatctggtgtttatcagtgtgccatgagacctaatcataccattaaaggttctttccttaatggatcatgtggtagtgttggttttaacattgattatgattgcgtgtctttctgctatatgcatcatatggagcttccaacaggagtacacgctggtactgacttagaaggtaaattctatggtccatttgttgacagacaaactgcacaggctgcaggtacagacacaaccataacattaaatgttttggcatggctgtatgctgctgttatcaatggtgataggtggtttcttaatagattcaccactactttgaatgactttaaccttgtggcaatgaagtacaactatgaacctttgacacaagatcatgttgacatattgggacctctttctgctcaaacaggaattgccgtcttagatatgtgtgctgctttgaaagagctgctgcagaatggtatgaatggtcgtactatccttggtagcactattttagaagatgagtttacaccatttgatgttgttagacaatgctctggtgttaccttccaaggtaagttcaagaaaattgttaagggcactcatcattggatgcttttaactttcttgacatcactattgattcttgttcaaagtacacagtggtcactgtttttctttgtttacgagaatgctttcttgccatttactcttggtattatggcaattgctgcatgtgctatgctgcttgttaagcataagcacgcattcttgtgcttgtttctgttaccttctcttgcaacagttgcttactttaatatggtctacatgcctgctagctgggtgatgcgtatcatgacatggcttgaattggctgacactagcttgtctggttataggcttaaggattgtgttatgtatgcttcagctttagttttgcttattctcatgacagctcgcactgtttatgatgatgctgctagacgtgtttggacactgatgaatgtcattacacttgtttacaaagtctactatggtaatgctttagatcaagctatttccatgtgggccttagttatttctgtaacctctaactattctggtgtcgttacgactatcatgtttttagctagagctatagtgtttgtgtgtgttgagtattacccattgttatttattactggcaacaccttacagtgtatcatgcttgtttattgtttcttaggctattgttgctgctgctactttggccttttctgtttactcaaccgttacttcaggcttactcttggtgtttatgactacttggtctctacacaagaatttaggtatatgaactcccaggggcttttgcctcctaagagtagtattgatgctttcaagcttaacattaagttgttgggtattggaggtaaaccatgtatcaaggttgctactgtacagtctaaaatgtctgacgtaaagtgcacatctgtggtactgctctcggttcttcaacaacttagagtagagtcatcttctaaattgtgggcacaatgtgtacaactccacaatgatattcttcttgcaaaagacacaactgaagctttcgagaagatggtttctcttttgtctgttttgctatccatgcagggtgctgtagacattaataggttgtgcgaggaaatgctcgataaccgtgctactcttcaggctattgcttcagaatttagttctttaccatcatatgccgcttatgccactgcccaggaggcctatgagcaggctgtagctaatggtgattctgaagtcgttctcaaaaagttaaagaaatctttgaatgtggctaaatctgagtttgaccgtgatgctgccatgcaacgcaagttggaaaagatggcagatcaggctatgacccaaatgtacaaacaggcaagatctgaggacaagagggcaaaagtaactagtgctatgcaaacaatgctcttcactatgcttaggaagcttgataatgatgcacttaacaacattatcaacaatgcgcgtgatggttgtgttccactcaacatcataccattgactacagcagccaaactcatggttgttgtccctgattatggtacctacaagaacacttgtgatggtaacacctttacatatgcatctgcactctgggaaatccagcaagttgttgatgcggatagcaagattgttcaacttagtgaaattaacatggacaattcaccaaatttggcttggcctcttattgttacagctctaagagccaactcagctgttaaactacagaataatgaactgagtccagtagcactacgacagatgtcctgtgcggctggtaccacacaaacagcttgtactgatgacaatgcacttgcctactataacaattcgaagggaggtaggtttgtgctggcattactatcagaccaccaagatctcaaatgggctagattccctaagagtgatggtacaggtacaatttacacagaactggaaccaccttgtaggtttgttacagacacaccaaaagggcctaaagtgaaatacttgtacttcatcaaaggcttaaacaacctaaatagaggtatggtgctgggcagtttagctgctacagtacgtcttcaggctggaaatgctacagaagtacctgccaattcaactgtgctttccttctgtgcttttgcagtagaccctgctaaagcatataaggattacctagcaagtggaggacaaccaatcaccaactgtgtgaagatgttgtgtacacacactggtacaggacaggcaattactgtaacaccagaagctaacatggaccaagagtcctttggtggtgcttcatgttgtctgtattgtagatgccacattgaccatccaaatcctaaaggattctgtgacttgaaaggtaagtacgtccaaatacctaccacttgtgctaatgacccagtgggttttacacttagaaacacagtctgtaccgtctgcggaatgtggaaaggttatggctgtagttgtgaccaactccgcgaacccttgatgcagtctgcggatgcatcaacgtttttaaacgggtttgcggtgtaagtgcagcccgtcttacaccgtgcggcacaggcactagtactgatgtcgtctacagggcttttgatatttacaacgaaaaagttgctggttttgcaaagttcctaaaaactaattgctgtcgcttccaggagaaggatgaggaaggcaatttattagactcttactttgtagttaagaggcatactatgtctaactaccaacatgaagagactatttataacttggttaaagattgtccagcggttgctgtccatgactttttcaagtttagagtagatggtgacatggtaccacatatatcacgtcagcgtctaactaaatacacaatggctgatttagtctatgctctacgtcattttgatgagggtaattgtgatacattaaaagaaatactcgtcacatacaattgctgtgatgatgattatttcaataagaaggattggtatgacttcgtagagaatcctgacatcttacgcgtatatgctaacttaggtgagcgtgtacgccaatcattattaaagactgtacaattctgcgatgctatgcgtgatgcaggcattgtaggcgtactgacattagataatcaggatcttaatgggaactggtacgatttcggtgatttcgtacaagtagcaccaggctgcggagttcctattgtggattcatattactcattgctgatgcccatcctcactttgactagggcattggctgctgagtcccatatggatgctgatctcgcaaaaccacttattaagtgggatttgctgaaatatgattttacggaagagagactttgtctcttcgaccgttattttaaatattgggaccagacataccatcccaattgtattaactgtttggatgataggtgtatccttcattgtgcaaactttaatgtgttattttctactgtgtttccacctacaagttttggaccactagtaagaaaaatatttgtagatggtgttccttttgttgtttcaactggataccattttcgtgagttaggagtcgtacataatcaggatgtaaacttacatagctcgcgtctcagtttcaaggaacttttagtgtatgctgctgatccagctatgcatgcagcttctggcaatttattgctagataaacgcactacatgcttttcagtagctgcactaacaaacaatgttgcttttcaaactgtcaaacccggtaattttaataaagacttttatgactttgctgtgtctaaaggtttctttaaggaaggaagttctgttgaactaaaacacttcttctttgctcaggatggcaacgctgctatcagtgattatgactattatcgttataatctgccaacaatgtgtgatatcagacaactcctattcgtagttgaagttgttgataaatactttgattgttacgatggtggctgtattaatgccaaccaagtaatcgttaacaatctggataaatcagctggtttcccatttaataaatggggtaaggctagactttattatgactcaatgagttatgaggatcaagatgcacttttcgcgtatactaagcgtaatgtcatccctactataactcaaatgaatcttaagtatgccattagtgcaaagaatagagctcgcaccgtagctggtgtctctatctgtagtactatgacaaatagacagtttcatcagaaattattgaagtcaatagccgccactagaggagctactgtggtaattggaacaagcaagttttacggtggctggcataatatgttaaaaactgtttacagtgatgtagaaactccacaccttatgggttgggattatccaaaatgtgacagagccatgcctaacatgcttaggataatggcctctcttgttcttgctcgcaaacataacacttgctgtaacttatcacaccgtttctacaggttagctaacgagtgtgcgcaagtattaagtgagatggtcatgtgtggcggctcactatatgttaaaccaggtggaacatcatccggtgatgctacaactgcttatgctaatagtgtctttaacatttgtcaagctgttacagccaatgtaaatgcacttctttcaactgatggtaataagatagctgacaagtatgtccgcaatctacaacacaggctctatgagtgtctctatagaaatagggatgttgatcatgaattcgtggatgagttttacgcttacctgcgtaaacatttctccatgatgattctttctgatgatgccgttgtgtgctataacagtaactatgcggctcaaggtttagtagctagcattaagaactttaaggcagttctttattatcaaaataatgtgttcatgtctgaggcaaaatgttggactgagactgaccttactaaaggacctcacgaattttgctcacagcatacaatgctagttaaacaaggagatgattacgtgtacctgccttacccagatccatcaagaatattaggcgcaggctgttttgtcgatgatattgtcaaaacagatggtacacttatgattgaaaggttcgtgtcactggctattgatgcttacccacttacaaaacatcctaatcaggagtatgctgatgtctttcacttgtatttacaatacattagaaagttacatgatgagcttactggccacatgttggacatgtattccgtaatgctaactaatgataacacctcacggtactgggaacctgagttttatgaggctatgtacacaccacatacagtcttgcaggctgtaggtgcttgtgtattgtgcaattcacagacttcacttcgttgcggtgcctgtattaggagaccattcctatgttgcaagtgctgctatgaccatgtcatttcaacatcacacaaattagtgttgtctgttaatccctatgtttgcaatgccccaggttgtgatgtcactgatgtgacacaactgtatctaggaggtatgagctattattgcaagtcacataagcctcccattagttttccattatgtgctaatggtcaggtttttggtttatacaaaaacacatgtgtaggcagtgacaatgtcactgacttcaatgcgatagcaacatgtgattggactaatgctggcgattacatacttgccaacacttgtactgagagactcaagcttttcgcagcagaaacgctcaaagccactgaggaaacatttaagctgtcatatggtattgctactgtacgcgaagtactctctgacagagaattgcatctttcatgggaggttggaaaacctagaccaccattgaacagaaactatgtctttactggttaccgtgtaactaaaaatagtaaagtacagattggagagtacacctttgaaaaaggtgactatggtgatgctgttgtgtacagaggtactacgacatacaagttgaatgttggtgattactttgtgttgacatctcacactgtaatgccacttagtgcacctactctagtgccacaagagcactatgtgagaattactggcttgtacccaacactcaacatctcagatgagttttctagcaatgttgcaaattatcaaaaggtcggcatgcaaaagtactctacactccaaggaccacctggtactggtaagagtcattttgccatcggacttgctctctattacccatctgctcgcatagtgtatacggcatgctctcatgcagctgttgatgccctatgtgaaaaggcattaaaatatttgcccatagataaatgtagtagaatcatacctgcgcgtgcgcgcgtagagtgttttgataaattcaaagtgaattcaacactagaacagtatgttttctgcactgtaaatgcattgccagaaacaactgctgacattgtagtctttgatgaaatctctatggctactaattatgacttgagtgttgtcaatgctagacttcgtgcaaaacactacgtctatattggcgatcctgctcaattaccagccccccgcacattgctgactaaaggcacactagaaccagaatattttaattcagtgtgcagacttatgaaaacaataggtccagacatgttccttggaacttgtcgccgttgtcctgctgaaattgttgacactgtgagtgctttagtttatgacaataagctaaaagcacacaaggataagtcagctcaatgcttcaaaatgttctacaaaggtgttattacacatgatgtttcatctgcaatcaacagacctcaaataggcgttgtaagagaatttcttacacgcaatcctgcttggagaaaagctgtttttatctcaccttataattcacagaacgctgtagcttcaaaaatcttaggattgcctacgcagactgttgattcatcacagggttctgaatatgactatgtcatattcacacaaactactgaaacagcacactcttgtaatgtcaaccgcttcaatgtggctatcacaagggcaaaaattggcattttgtgcataatgtctgatagagatctttatgacaaactgcaatttacaagtctagaaataccacgtcgcaatgtggctacattacaagcagaaaatgtaactggactttttaaggactgtagtaagatcattactggtcttcatcctacacaggcacctacacacctcagcgttgatataaagttcaagactgaaggattatgtgttgacataccaggcataccaaaggacatgacctaccgtagactcatctctatgatgggtttcaaaatgaattaccaagtcaatggttaccctaatatgtttatcacccgcgaagaagctattcgtcacgttcgtgcgtggattggctttgatgtagagggctgtcatgcaactagagatgctgtgggtactaacctacctctccagctaggattttctacaggtgttaacttagtagctgtaccgactggttatgttgacactgaaaataacacagaattcaccagagttaatgcaaaacctccaccaggtgaccagtttaaacatcttataccactcatgtataaaggcttgccctggaatgtagtgcgtattaagatagtacaaatgctcagtgatacactgaaaggattgtcagacagagtcgtgttcgtcctttgggcgcatggctttgagcttacatcaatgaagtactttgtcaagattggacctgaaagaacgtgttgtctgtgtgacaaacgtgcaacttgcttttctacttcatcagatacttatgcctgctggaatcattctgtgggttttgactatgtctataacccatttatgattgatgttcagcagtggggctttacgggtaaccttcagagtaaccatgaccaacattgccaggtacatggaaatgcacatgtggctagttgtgatgctatcatgactagatgtttagcagtccatgagtgctttgttaagcgcgttgattggtctgttgaataccctattataggagatgaactgagggttaattctgcttgcagaaaagtacaacacatggttgtgaagtctgcattgcttgctgataagtttccagttcttcatgacattggaaatccaaaggctatcaagtgtgtgcctcaggctgaagtagaatggaagttctacgatgctcagccatgtagtgacaaagcttacaaaatagaggagctcttctattcttatgctacacatcacgataaattcactgatggtgtttgtttgttttggaattgtaacgttgatcgttacccagccaatgcaattgtgtgtaggtttgacacaagagtcttgtcaaacttgaacttaccaggctgtgatggtggtagtttgtatgtgaataagcatgcattccacactccagctttcgataaaagtgcatttactaatttaaagcaattgcctttcttttactattctgatagtccttgtgagtctcatggcaaacaagtagtgtcggatattgattatgttccactcaaatctgctacgtgtattacacgatgcaatttaggtggtgctgtttgcagacaccatgcaaatgagtaccgacagtacttggatgcatataatatgatgatttctgctggatttagcctatggatttacaaacaatttgatacttataacctgtggaatacatttaccaggttacagagtttagaaaatgtggcttataatgttgttaataaaggacactttgatggacacgccggcgaagcacctgtttccatcattaataatgctgtttacacaaaggtagatggtattgatgtggagatctttgaaaataagacaacacttcctgttaatgttgcatttgagctttgggctaagcgtaacattaaaccagtgccagagattaagatactcaataatttgggtgttgatatcgctgctaatactgtaatctgggactacaaaagagaagccccagcacatgtatctacaataggtgtctgcacaatgactgacattgccaagaaacctactgagagtgcttgttcttcacttactgtcttgtttgatggtagagtggaaggacaggtagacctttttagaaacgcccgtaatggtgttttaataacagaaggttcagtcaaaggtctaacaccttcaaagggaccagcacaagctagcgtcaatggagtcacattaattggagaatcagtaaaaacacagtttaactactttaagaaagtagacggcattattcaacagttgcctgaaacctactttactcagagcagagacttagaggattttaagcccagatcacaaatggaaactgactttctcgagctcgctatggatgaattcatacagcgatataagctcgagggctatgccttcgaacacatcgtttatggagatttcagtcatggacaacttggcggtcttcatttaatgataggcttagccaagcgctcacaagattcaccacttaaattagaggattttatccctatggacagcacagtgaaaaattacttcataacagatgcgcaaacaggttcatcaaaatgtgtgtgttctgtgattgatcttttacttgatgactttgtcgagataataaagtcacaagatttgtcagtgatttcaaaagtggtcaaggttacaattgactatgctgaaatttcattcatgctttggtgtaaggatggacatgttgaaaccttctacccaaaactacaagcaagtcaagcgtggcaaccaggtgttgcgatgcctaacttgtacaagatgcaaagaatgcttcttgaaaagtgtgaccttcagaattatggtgaaaatgctgttataccaaaaggaataatgatgaatgtcgcaaagtatactcaactgtgtcaatacttaaatacacttactttagctgtaccctacaacatgagagttattcactttggtgctggctctgataaaggagttgcaccaggtacagctgtgctcagacaatggttgccaactggcacactacttgtcgattcagatcttaatgacttcgtctccgacgcagattctactttaattggagactgtgcaacagtacatacggctaataaatgggaccttattattagcgatatgtatgaccctaggaccaaacatgtgacaaaagagaatgactctaaagaagggtttttcacttatctgtgtggatttataaagcaaaaactagccctgggtggttctatagctgtaaagataacagagcattcttggaatgctgacctttacaagcttatgggccatttctcatggtggacagcttttgttacaaatgtaaatgcatcatcatcggaagcatttttaattggggctaactatcttggcaagccgaaggaacaaattgatggctataccatgcatgctaactacattttctggaggaacacaaatcctatccagttgtcttcctattcactctttgacatgagcaaatttcctcttaaattaagaggaactgctgtaatgtctcttaaggagaatcaaatcaatgatatgatttattctcttctggaaaaaggtaggcttatcattagagaaaacaacagagttgtggtttcaagtgatattcttgttaacaactaaacgaacatgtttattttcttattatttcttactctcactagtggtagtgaccttgaccggtgcaccacttttgatgatgttcaagctcctaattacactcaacatacttcatctatgaggggggtttactatcctgatgaaatttttagatcagacactctttatttaactcaggatttatttcttccattttattctaatgttacagggtttcatactattaatcatacgtttggcaaccctgtcataccttttaaggatggtatttattttgctgccacagagaaatcaaatgttgtccgtggttgggtttttggttctaccatgaacaacaagtcacagtcggtgattattattaacaattctactaatgttgttatacgagcatgtaactttgaattgtgtgacaaccctttctttgctgtttctaaacccatgggtacacagacacatactatgatattcgataatgcatttaattgcactttcgagtacatatctgatgccttttcgcttgatgtttcagaaaagtcaggtaattttaaacacttacgagagtttgtgtttaaaaataaagatgggtttctctatgtttataagggctatcaacctatagatgtagttcgtgatctaccttctggttttaacactttgaaacctatttttaagttgcctcttggtattaacattacaaattttagagccattcttacagccttttcacctgctcaagacatttggggcacgtcagctgcagcctattttgttggctatttaaagccaactacatttatgctcaagtatgatgaaaatggtacaatcacagatgctgttgattgttctcaaaatccacttgctgaactcaaatgctctgttaagagctttgagattgacaaaggaatttaccagacctctaatttcagggttgttccctcaggagatgttgtgagattccctaatattacaaacttgtgtccttttggagaggtttttaatgctactaaattcccttctgtctatgcatgggagagaaaaaaaatttctaattgtgttgctgattactctgtgctctacaactcaacatttttttcaacctttaagtgctatggcgtttctgccactaagttgaatgatctttgcttctccaatgtctatgcagattcttttgtagtcaagggagatgatgtaagacaaatagcgccaggacaaactggtgttattgctgattataattataaattgccagatgatttcatgggttgtgtccttgcttggaatactaggaacattgatgctacttcaactggtaattataattataaatataggtatcttagacatggcaagcttaggccctttgagagagacatatctaatgtgcctttctcccctgatggcaaaccttgcaccccacctgctcttaattgttattggccattaaatgattatggtttttacaccactactggcattggctaccaaccttacagagttgtagtactttcttttgaacttttaaatgcaccggccacggtttgtggaccaaaattatccactgaccttattaagaaccagtgtgtcaattttaattttaatggactcactggtactggtgtgttaactccttcttcaaagagatttcaaccatttcaacaatttggccgtgatgtttctgatttcactgattccgttcgagatcctaaaacatctgaaatattagacatttcaccttgctcttttgggggtgtaagtgtaattacacctggaacaaatgcttcatctgaagttgctgttctatatcaagatgttaactgcactgatgtttctacagcaattcatgcagatcaactcacaccagcttggcgcatatattctactggaaacaatgtattccagactcaagcaggctgtcttataggagctgagcatgtcgacacttcttatgagtgcgacattcctattggagctggcatttgtgctagttaccatacagtttctttattacgtagtactagccaaaaatctattgtggcttatactatgtctttaggtgctgatagttcaattgcttactctaataacaccattgctatacctactaacttttcaattagcattactacagaagtaatgcctgtttctatggctaaaacctccgtagattgtaatatgtacatctgcggagattctactgaatgtgctaatttgcttctccaatatggtagcttttgcacacaactaaatcgtgcactctcaggtattgctgctgaacaggatcgcaacacacgtgaagtgttcgctcaagtcaaacaaatgtacaaaaccccaactttgaaatattttggtggttttaatttttcacaaatattacctgaccctctaaagccaactaagaggtcttttattgaggacttgctctttaataaggtgacactcgctgatgctggcttcatgaagcaatatggcgaatgcctaggtgatattaatgctagagatctcatttgtgcgcagaagttcaatggacttacagtgttgccacctctgctcactgatgatatgattgctgcctacactgctgctctagttagtggtactgccactgctggatggacatttggtgctggcgctgctcttcaaataccttttgctatgcaaatggcatataggttcaatggcattggagttacccaaaatgttctctatgagaaccaaaaacaaatcgccaaccaatttaacaaggcgattagtcaaattcaagaatcacttacaacaacatcaactgcattgggcaagctgcaagacgttgttaaccagaatgctcaagcattaaacacacttgttaaacaacttagctctaattttggtgcaatttcaagtgtgctaaatgatatcctttcgcgacttgataaagtcgaggcggaggtacaaattgacaggttaattacaggcagacttcaaagccttcaaacctatgtaacacaacaactaatcagggctgctgaaatcagggcttctgctaatcttgctgctactaaaatgtctgagtgtgttcttggacaatcaaaaagagttgacttttgtggaaagggctaccaccttatgtccttcccacaagcagccccgcatggtgttgtcttcctacatgtcacgtatgtgccatcccaggagaggaacttcaccacagcgccagcaatttgtcatgaaggcaaagcatacttccctcgtgaaggtgtttttgtgtttaatggcacttcttggtttattacacagaggaacttcttttctccacaaataattactacagacaatacatttgtctcaggaaattgtgatgtcgttattggcatcattaacaacacagtttatgatcctctgcaacctgagctcgactcattcaaagaagagctggacaagtacttcaaaaatcatacatcaccagatgttgatcttggcgacatttcaggcattaacgcttctgtcgtcaacattcaaaaagaaattgaccgcctcaatgaggtcgctaaaaatttaaatgaatcactcattgaccttcaagaattgggaaaatatgagcaatatattaaatggccttggtatgtttggctcggcttcattgctggactaattgccatcgtcatggttacaatcttgctttgttgcatgactagttgttgcagttgcctcaagggtgcatgctcttgtggttcttgctgcaagtttgatgaggatgactctgagccagttctcaagggtgtcaaattacattacacataaacgaacttatggatttgtttatgagattttttactcttggatcaattactgcacagccagtaaaaattgacaatgcttctcctgcaagtactgttcatgctacagcaacgataccgctacaagcctcactccctttcggatggcttgttattggcgttgcatttcttgctgtttttcagagcgctaccaaaataattgcgctcaataaaagatggcagctagccctttataagggcttccagttcatttgcaatttactgctgctatttgttaccatctattcacatcttttgcttgtcgctgcaggtatggaggcgcaatttttgtacctctatgccttgatatattttctacaatgcatcaacgcatgtagaattattatgagatgttggctttgttggaagtgcaaatccaagaacccattactttatgatgccaactactttgtttgctggcacacacataactatgactactgtataccatataacagtgtcacagatacaattgtcgttactgaaggtgacggcatttcaacaccaaaactcaaagaagactaccaaattggtggttattctgaggataggcactcaggtgttaaagactatgtcgttgtacatggctatttcaccgaagtttactaccagcttgagtctacacaaattactacagacactggtattgaaaatgctacattcttcatctttaacaagcttgttaaagacccaccgaatgtgcaaatacacacaatcgacggctcttcaggagttgctaatccagcaatggatccaatttatgatgagccgacgacgactactagcgtgcctttgtaagcacaagaaagtgagtacgaacttatgtactcattcgtttcggaagaaacaggtacgttaatagttaatagcgtacttctttttcttgctttcgtggtattcttgctagtcacactagccatccttactgcgcttcgattgtgtgcgtactgctgcaatattgttaacgtgagtttagtaaaaccaacggtttacgtctactcgcgtgttaaaaatctgaactcttctgaaggagttcctgatcttctggtctaaacgaactaactattattattattctgtttggaactttaacattgcttatcatggcagacaacggtactattaccgttgaggagcttaaacaactcctggaacaatggaacctagtaataggtttcctattcctagcctggattatgttactacaatttgcctattctaatcggaacaggtttttgtacataataaagcttgttttcctctggctcttgtggccagtaacacttgcttgttttgtgcttgctgctgtctacagaattaattgggtgactggcgggattgcgattgcaatggcttgtattgtaggcttgatgtggcttagctacttcgttgcttccttcaggctgtttgctcgtacccgctcaatgtggtcattcaacccagaaacaaacattcttctcaatgtgcctctccgggggacaattgtgaccagaccgctcatggaaagtgaacttgtcattggtgctgtgatcattcgtggtcacttgcgaatggccggacaccccctagggcgctgtgacattaaggacctgccaaaagagatcactgtggctacatcacgaacgctttcttattacaaattaggagcgtcgcagcgtgtaggcactgattcaggttttgctgcatacaaccgctaccgtattggaaactataaattaaatacagaccacgccggtagcaacgacaatattgctttgctagtacagtaagtgacaacagatgtttcatcttgttgacttccaggttacaatagcagagatattgattatcattatgaggactttcaggattgctatttggaatcttgacgttataataagttcaatagtgagacaattatttaagcctctaactaagaagaattattcggagttagatgatgaagaacctatggagttagattatccataaaacgaacatgaaaattattctcttcctgacattgattgtatttacatcttgcgagctatatcactatcaggagtgtgttagaggtacgactgtactactaaaagaaccttgcccatcaggaacatacgagggcaattcaccatttcaccctcttgctgacaataaatttgcactaacttgcactagcacacactttgcttttgcttgtgctgacggtactcgacatacctatcagctgcgtgcaagatcagtttcaccaaaacttttcatcagacaagaggaggttcaacaagagctctactcgccactttttctcattgttgctgctctagtatttttaatactttgcttcaccattaagagaaagacagaatgaatgagctcactttaattgacttctatttgtgctttttagcctttctgctattccttgttttaataatgcttattatattttggttttcactcgaaatccaggatctagaagaaccttgtaccaaagtctaaacgaacatgaaacttctcattgttttgacttgtatttctctatgcagttgcatatgcactgtagtacagcgctgtgcatctaataaacctcatgtgcttgaagatccttgtaaggtacaacactaggggtaatacttatagcactgcttggctttgtgctctaggaaaggttttaccttttcatagatggcacactatggttcaaacatgcacacctaatgttactatcaactgtcaagatccagctggtggtgcgcttatagctaggtgttggtaccttcatgaaggtcaccaaactgctgcatttagagacgtacttgttgttttaaataaacgaacaaattaaaatgtctgataatggaccccaatcaaaccaacgtagtgccccccgcattacatttggtggacccacagattcaactgacaataaccagaatggaggacgcaatggggcaaggccaaaacagcgccgaccccaaggtttacccaataatactgcgtcttggttcacagctctcactcagcatggcaaggaggaacttagattccctcgaggccagggcgttccaatcaacaccaatagtggtccagatgaccaaattggctactaccgaagagctacccgacgagttcgtggtggtgacggcaaaatgaaagagctcagccccagatggtacttctattacctaggaactggcccagaagcttcacttccctacggcgctaacaaagaaggcatcgtatgggttgcaactgagggagccttgaatacacccaaagaccacattggcacccgcaatcctaataacaatgctgccaccgtgctacaacttcctcaaggaacaacattgccaaaaggcttctacgcagagggaagcagaggcggcagtcaagcctcttctcgctcctcatcacgtagtcgcggtaattcaagaaattcaactcctggcagcagtaggggaaattctcctgctcgaatggctagcggaggtggtgaaactgccctcgcgctattgctgctagacagattgaaccagcttgagagcaaagtttctggtaaaggccaacaacaacaaggccaaactgtcactaagaaatctgctgctgaggcatctaaaaagcctcgccaaaaacgtactgccacaaaacagtacaacgtcactcaagcatttgggagacgtggtccagaacaaacccaaggaaatttcggggaccaagacctaatcagacaaggaactgattacaaacattggccgcaaattgcacaatttgctccaagtgcctctgcattctttggaatgtcacgcattggcatggaagtcacaccttcgggaacatggctgacttatcatggagccattaaattggatgacaaagatccacaattcaaagacaacgtcatactgctgaacaagcacattgacgcatacaaaacattcccaccaacagagcctaaaaaggacaaaaagaaaaagactgatgaagctcagcctttgccgcagagacaaaagaagcagcccactgtgactcttcttcctgcggctgacatggatgatttctccagacaacttcaaaattccatgagtggagcttctgctgattcaactcaggcataaacactcatgatgaccacacaaggcagatgggctatgtaaacgttttcgcaattccgtttacgatacatagtctactcttgtgcagaatgaattctcgtaactaaacagcacaagtaggtttagttaactttaatctcacatagcaatctttaatcaatgtgtaacattagggaggacttgaaagagccaccacattttcatcgaggccacgcggagtacgatcgagggtacagtgaataatgctagggagagctgcctatatggaagagccctaatgtgtaaaattaattttagtagtgctatccccatgtgattttaatagcttcttaggagaatgac

SEQ ID NO: 3 - DNA, 30111 bp, Artificial Sequence
  Betacoronavirus England 1 isolate H123990006
atttaagtgaatagcttggctatctcacttcccctcgttctcttgcagaactttgattttaacgaacttaaataaaagccctgttgtttagcgtattgttgcacttgtctggtgggattgtggcattaatttgcctgctcatctaggcagtggacatatgctcaacactgggtataattctaattgaatactatttttcagttagagcgtcgtgtctcttgtacgtctcggtcacaatacacggtttcgtccggtgcgtggcaattcggggcacatcatgtctttcgtggctggtgtgaccgcgcaaggtgcgcgcggtacgtatcgagcagcgctcaactctgaaaaacatcaagaccatgtgtctctaactgtgccactctgtggttcaggaaacctggttgaaaaactttcaccatggttcatggatggcgaaaatgcctatgaagtggtgaaggccatgttacttaaaaaggagccacttctctatgtgcccatccggctggctggacacactagacacctcccaggtcctcgtgtatacctggttgagaggctcattgcttgtgaaaatccattcatggttaaccaattggcttatagctctagtgcaaatggcagcttggttggcacaactttgcagggcaagcctattggtatgttcttcccttatgacatcgaacttgtcacaggaaagcaaaatattctcctgcgcaagtatggccgtggtggttatcactacaccccattccactatgagcgagacaacacctcttgccctgagtggatggacgattttgaggcggatcctaaaggcaaatatgcccagaatctgcttaagaagttgattggcggtgatgtcactccagttgaccaatacatgtgtggcgttgatggaaaacccattagtgcctacgcatttttaatggccaaggatggaataaccaaactggctgatgttgaagcggacgtcgcagcacgtgctgatgacgaaggcttcatcacattaaagaacaatctatatagattggtttggcatgttgagcgtaaagacgttccatatcctaagcaatctatttttactattaatagtgtggtccaaaaggatggtgttgaaaacactcctcctcactattttactcttggatgcaaaattttaacgctcaccccacgcaacaagtggagtggcgtttctgacttgtccctcaaacaaaaactcctttacaccttctatggtaaggagtcacttgagaacccaacctacatttaccactccgcattcattgagtgtggaagttgtggtaatgattcctggcttacagggaatgctatccaagggtttgcctgtggatgtggggcatcatatacagctaatgatgtcgaagtccaatcatctggcatgattaagccaaatgctcttctttgtgctacttgcccctttgctaagggtgatagctgttcttctaattgcaaacattcagttgctcagttggttagttacctttctgaacgttgtaatgttattgctgattctaagtccttcacacttatctttggtggcgtagcttacgcctactttggatgtgaggaaggtactatgtactttgtgcctagagctaagtctgttgtctcaaggattggagactccatctttacaggctgtactggctcttggaacaaggtcactcaaattgctaacatgttcttggaacagactcagcattcccttaactttgtgggagagttcgttgtcaacgatgttgtcctcgcaattctctctggaaccacaactaatgttgacaaaatacgccagcttctcaaaggtgtcacccttgacaagttgcgtgattatttagctgactatgacgtagcagtcactgccggcccattcatggataatgctattaatgttggtggtacaggattacagtatgccgccattactgcaccttatgtagttctcactggcttaggtgagtcctttaagaaagttgcaaccataccgtacaaggtttgcaactctgttaaggatactctgacttattatgctcacagcgtgttgtacagagtttttccttatgacatggattctggtgtgtcatcctttagtgaactactttttgattgcgttgatctttcagtagcttctacctattttttagtccgcctcttgcaagataagactggcgactttatgtctacaattattacttcctgccaaactgctgttagtaagcttctagatacatgttttgaagctacagaagcaacatttaacttcttgttagatttggcaggattgttcagaatctttcttcgcaatgcctatgtgtacacttcacaagggtttgtggtggtcaatggcaaagtttctacacttgtcaaacaagtgttagacttgcttaataagggtatgcaacttttgcatacaaaggtctcctgggctggttctaatatcagtgctgttatctacagcggcagggagtctctaatattcccatcgggaacctattactgtgtcaccactaaggctaagtccgttcaacaagatcttgacgttattttgcctggtgagttttccaagaagcagttaggactgctccaacctactgacaattctacaactgttagtgttactgtatccagtaacatggttgaaactgttgtgggtcaacttgagcaaactaatatgcatagtcctgatgttatagtaggtgactatgtcattattagtgaaaaattgtttgtgcgtagtaaggaagaagacggatttgccttctaccctgcttgcactaatggtcatgctgtaccgactctctttagacttaagggaggtgcacctgtaaaaaaagtagcctttggcggtgatcaagtacatgaggttgctgctgtaagaagtgttactgtcgagtacaacattcatgctgtattagacacactacttgcttcttctagtcttagaacctttgttgtagataagtctttgtcaattgaggagtttgctgacgtagtaaaggaacaagtctcagacttgcttgttaaattactgcgtggaatgccgattccagattttgatttagacgattttattgacgcaccatgctattgctttaacgctgagggtgatgcatcttggtcttctactatgatcttctctcttcaccccgtcgagtgtgacgaggagtgttctgaagtagaggcttcagatttagaagaaggtgaatcagagtgcatttctgagacttcaactgaacaagttgacgtttctcatgagatttctgacgacgagtgggctgctgcagttgatgaagcgttccccctcgatgaagcagaagatgttactgaatctgtgcaagaagaagcacaaccagtagaagtacctgttgaagatattgcgcaggttgtcatagctgacaccttacaggaaactcctgttgtgtctgatactgttgaagtcccaccgcaagtggtgaaacttccgtctgaacctcagactatccagcccgaggtaaaagaagttgcacctgtctatgaggctgataccgaacagacacagagtgttactgttaaacctaagaggttacgcaaaaagcgtaatgttgaccctttgtccaattttgaacataaggttattacagagtgcgttaccatagttttaggtgacgcaattcaagtagccaagtgctatggggagtctgtgttagttaatgctgctaacacacatcttaagcatggcggtggtatcgctggtgctattaatgcggcttcaaaaggggctgtccaaaaagagtcagatgagtatattctggctaaagggccgttacaagtaggagattcagttctcttgcaaggccattctctagctaagaatatcctgcatgtcgtaggcccagatgcccgcgctaaacaggatgtttctctccttagtaagtgctataaggctatgaatgcatatcctcttgtagtcactcctcttgtttcagcaggcatatttggtgtaaaaccagctgtgtcttttgattatcttattagagaggctaagactagagttttagtcgtcgttaattcccaagatgtctataagagtcttaccatagttgacattccacagagtttgactttttcatatgatgggttacgtggcgcaatacgtaaagctaaagattatggttttactgtttttgtgtgcacagacaactctgctaacactaaagttcttaggaacaagggtgttgattatactaagaagtttcttacagttgacggtgtgcaatattattgctacacgtctaaggacactttagatgatatcttacaacaggctaataagtctgttggtattatatctatgcctttgggatatgtgtctcatggtttagacttaattcaagcagggagtgtcgtgcgtagagttaacgtgccctacgtgtgtctcctagctaataaagagcaagaagctattttgatgtctgaagacgttaagttaaacccttcagaagattttataaagcacgtccgcactaatggtggttacaattcttggcatttagtcgagggtgaactattggtgcaagacttacgcttaaataagctcctgcattggtctgatcaaaccatatgctacaaggatagtgtgttttatgttgtaaagaatagtacagcttttccatttgaaacactttcagcatgtcgtgcgtatttggattcacgcacgacacagcagttaacaatcgaagtcttagtgactgtcgatggtgtaaattttagaacagtcgttctaaataataagaacacttatagatcacagcttggatgcgttttctttaatggtgctgatatttctgataccattcctgatgagaaacagaatggtcacagtttatatctagcagacaatttgactgctgatgaaacaaaggcgcttaaagagttatatggccccgttgatcctactttcttacacagattctattcacttaaggctgcagtccataagtggaagatggttgtgtgtgataaggtacgttctctcaaattgagtgataataattgttatcttaatgcagttattatgacacttgatttattgaaggacattaaatttgttatacctgctctacagcatgcatttatgaaacataagggcggtgattcaactgacttcatagccctcattatggcttatggcaattgcacatttggtgctccagatgatgcctctcggttacttcataccgtgcttgcaaaggctgagttatgctgttctgcacgcatggtttggagagagtggtgcaatgtctgtggcataaaagatgttgttctacaaggcttaaaagcttgttgttacgtgggtgtgcaaactgttgaagatctgcgtgctcgcatgacatatgtatgccagtgtggtggtgaacgtcatcggcaaatagtcgaacacaccaccccctggttgctgctctcaggcacaccaaatgaaaaattggtgacaacctccacggcgcctgattttgtagcgtttaatgtctttcagggcattgaaacggctgttggccattatgttcatgctcgcctgaagggtggtcttattttaaagtttgactctggcaccgttagcaagacttcagactggaagtgcaaggtgacagatgtacttttccccggccaaaaatacagtagcgattgtaatgtcgtacggtattctttggacggtaatttcagaacagaggttgatcccgacctatctgctttctatgttaaggatggtaaatactttacaagtgaaccacccgtaacatattcaccagctacaattttagctggtagtgtctacactaatagctgccttgtatcgtctgatggacaacctggcggtgatgctattagtttgagttttaataaccttttagggtttgattctagtaaaccagtcactaagaaatacacttactccttcttgcctaaagaagacggcgatgtgttgttggctgagtttgacacttatgaccctatttataagaatggtgccatgtataaaggcaaaccaattctttgggtcaacaaagcatcttatgatactaatcttaataagttcaatagagctagtttgcgtcaaatttttgacgtagcccccattgaactcgaaaataaattcacacctttgagtgtggagtctacaccagttgaacctccaactgtagatgtggtagcacttcaacaggaaatgacaattgtcaaatgtaagggtttaaataaacctttcgtgaaggacaatgtcagtttcgttgctgatgactcaggtactcccgttgttgagtatctgtctaaagaagatctacatacattgtatgtagaccctaagtatcaagtcattgtcttaaaagacaatgtactttcttctatgcttagattgcacaccgttgagtcaggtgatattaacgttgttgcagcttccggatctttgacacgtaaagtgaagttactatttagggcttcattttatttcaaagaatttgctacccgcactttcactgctaccactgctgtaggtagttgtataaagagtgtagtgcggcatctaggtgttactaaaggcatattgacaggctgttttagttttgtcaagatgttatttatgcttccactagcttactttagtgattcaaaactcggcaccacagaggttaaagtgagtgctttgaaaacagctggcgttgtgacaggtaatgttgtaaaacagtgttgcactgctgctgttgatttaagtatggataagttgcgccgtgtggattggaaatcaaccctacggttgttacttatgttatgcacaactatggtattgttgtcttctgtgtatcacttgtatgtcttcaatcaggtcttatcaagtgatgttatgtttgaagatgcccaaggtttgaaaaagttctacaaagaagttagagcttacctaggaatctcttctgcttgtgacggtcttgcttcagcttatagggcgaattcctttgatgtacctacattctgcgcaaaccgttctgcaatgtgtaattggtgcttgattagccaagattccataactcactacccagctcttaagatggttcaaacacatcttagccactatgttcttaacatagattggttgtggtttgcatttgagactggtttggcatacatgctctatacctcggccttcaactggttgttgttggcaggtacattgcattatttctttgcacagacttccatatttgtagactggcggtcatacaattatgctgtgtctagtgccttctggttattcacccacattccaatggcgggtttggtacgaatgtataatttgttagcatgcctttggcttttacgcaagttttatcagcatgtaatcaatggttgcaaagatacggcatgcttgctctgctataagaggaaccgacttactagagttgaagcttctaccgttgtctgtggtggaaaacgtacgttttatatcacagcaaatggcggtatttcattctgtcgtaggcataattggaattgtgtggattgtgacactgcaggtgtggggaataccttcatctgtgaagaagtcgcaaatgacctcactaccgccctacgcaggcctattaacgctacggatagatcacattattatgtggattccgttacagttaaagagactgttgttcagtttaattatcgtagagacggtcaaccattctacgagcggtttcccctctgcgcttttacaaatctagataagttgaagttcaaagaggtctgtaaaactactactggtatacctgaatacaactttatcatctacgactcatcagatcgtggccaggaaagtttagctaggtctgcatgtgtttattattctcaagtcttgtgtaaatcaattcttttggttgactcaagtttggttacttctgttggtgattctagtgaaatcgccactaaaatgtttgattcctttgttaatagtttcgtctcgctgtataatgtcacacgcgataagttggaaaaacttatctctactgctcgtgatggcgtaaggcgaggcgataacttccatagtgtcttaacaacattcattgacgcagcacgaggccccgcaggtgtggagtctgatgttgagaccaatgaaattgttgactctgtgcagtatgctcataaacatgacatacaaattactaatgagagttacaataattatgtaccctcatatgttaaacctgatagtgtgtctaccagtgatttaggtagtctcattgattgtaatgcggcttcagttaaccaaattgtcttgcgtaattctaatggtgcttgtatttggaacgctgctgcatatatgaaactctcggatgcacttaaacgacagattcgcattgcatgccgtaagtgtaatttagctttccggttaaccacctcaaagctacgcgctaatgataatatcttatcagttagattcactgctaacaaaattgttggtggtgctcctacatggtttaatgcgttgcgtgactttacgttaaagggttacgttcttgctaccattattgtgtttctgtgtgctgtactgatgtatttgtgtttacctacattttctatggtacctgttgaattttatgaagaccgcatcttggactttaaagttcttgataatggtatcattagggatgtaaatcctgatgataagtgctttgctaataagcaccggtccttcacacaatggtatcatgagcatgttggtggtgtctatgacaactctatcacatgcccattgacagttgcagtaattgctggagttgctggtgctcgcattccagacgtacctactacattggcttgggtgaacaatcagataattttctttgtttctcgagtctttgctaatacaggcagtgtttgctacactcctatagatgagataccctataagagtttctctgatagtggttgcattcttccatctgagtgcactatgtttagggatgcagagggccgtatgacaccatactgccatgatcctactgttttgcctggggcttttgcgtacagtcagatgaggcctcatgttcgttacgacttgtatgatggtaacatgtttattaaatttcctgaagtagtatttgaaagtacacttaggattactagaactctgtcaactcagtactgccggttcggtagttgtgagtatgcacaagagggtgtttgtattaccacaaatggctcgtgggccatttttaatgaccaccatcttaatagacctggtgtctattgtggctctgattttattgacattgtcaggcggttagcagtatcactgttccagcctattacttatttccaattgactacctcattggtcttgggtataggtttgtgtgcgttcctgactttgctcttctattatattaataaagtaaaacgtgcttttgcagattacacccagtgtgctgtaattgctgttgttgctgctgttcttaatagcttgtgcatctgctttgttgcctctataccattgtgtatagtaccttacactgcattgtactattatgctacattctattttactaatgagcctgcatttattatgcatgtttcttggtacattatgttcgggcctatcgttcccatatggatgacctgcgtctatacagttgcaatgtgctttagacacttcttctgggttttagcttattttagtaagaaacatgtagaagtttttactgatggtaagcttaattgtagtttccaggacgctgcctctaatatctttgttattaacaaggacacttatgcagctcttagaaactctttaactaatgatgcctattcacgatttttggggttgtttaacaagtataagtacttctctggtgctatggaaacagccgcttatcgtgaagctgcagcatgtcatcttgctaaagccttacaaacatacagcgagactggtagtgatcttctttaccaaccacccaactgtagcataacctctggcgtgttgcaaagcggtttggtgaaaatgtcacatcccagtggagatgttgaggcttgtatggttcaggttacctgcggtagcatgactcttaatggtctttggcttgacaacacagtctggtgcccacgacacgtaatgtgcccggctgaccagttgtctgatcctaattatgatgccttgttgatttctatgactaatcatagtttcagtgtgcaaaaacacattggcgctccagcaaacttgcgtgttgttggtcatgccatgcaaggcactcttttgaagttgactgtcgatgttgctaaccctagcactccagcctacacttttacaacagtgaaacctggcgcagcatttagtgtgttagcatgctataatggtcgtccgactggtacattcactgttgtaatgcgccctaactacacaattaagggttcctttctgtgtggttcttgtggtagtgttggttacaccaaggagggtagtgtgatcaatttttgttacatgcatcaaatggaacttgctaatggtacacataccggttcagcatttgatggtactatgtatggtgcctttatggataaacaagtgcaccaagttcagttaacagacaaatactgcagtgttaatgtagtagcttggctttacgcagcaatacttaatggttgcgcttggtttgtaaaacctaatcgcactagtgttgtttcttttaatgaatgggctcttgccaaccaattcactgaatttgttggcactcaatccgttgacatgttagctgtcaaaacaggcgttgctattgaacagctgctttatgcgatccaacaactttatactgggttccagggaaagcaaatccttggcagtaccatgttggaagatgaattcacacctgaggatgttaatatgcagattatgggtgtggttatgcagagtggtgtgagaaaagttacatatggtactgcgcattggttgttcgcgacccttgtctcaacctatgtgataatcttacaagccactaaatttactttgtggaactacttgtttgagactattcccacacagttgttcccactcttatttgtgactatggccttcgttatgttgttggttaaacacaaacacacctttttgacacttttcttgttgcctgtggctatttgtttgacttatgcaaacatagtctacgagcccactactcccatttcgtcagcgctgattgcagttgcaaattggcttgcccccactaatgcttatatgcgcactacacatactgatattggtgtctacattagtatgtcacttgtattagtcattgtagtgaagagattgtacaacccatcactttctaactttgcgttagcattgtgcagtggtgtaatgtggttgtacacttatagcattggagaagcctcaagccccattgcctatctggtttttgtcactacactcactagtgattatacgattacagtctttgttactgttaaccttgcaaaagtttgcacttatgccatctttgcttactcgccacagcttacacttgtgtttccggaagtgaagatgatacttttattatacacatgtttaggtttcatgtgtacttgctattttggtgtcttctctcttttgaaccttaagcttagagcacctatgggtgtctatgactttaaggtctcaacacaagagttcagattcatgacagctaacaatctaactgcacctagaaattcttgggaggctatggctctgaactttaagttaataggtattggcggtacaccttgtataaaggttgctgctatgcagtctaaacttacagatcttaaatgcacatctgtggttctcctctctgtgctccaacagttacacttagaggctaatagtagggcctgggctttctgtgttaaatgccataatgatatattggcagcaacagaccccagtgaggctttcgagaaattcgtaagtctctttgccactttaatgactttttctggtaatgtagatcttgatgcgttagctagtgatatttttgacactcctagcgtacttcaagctactctttctgagttttcacacttagctacctttgctgagttggaagctgcgcagaaagcctatcaggaagctatggactctggtgacacctcaccacaagttcttaaggctttgcagaaggctgttaatatagctaaaaacgcctatgagaaggataaggcagtggcccgtaagttagaacgtatggctgatcaggctatgacttctatgtataagcaagcacgtgctgaagacaagaaagcaaaaattgtcagtgctatgcaaactatgttgtttggtatgattaagaagctcgacaacgatgttcttaatggtatcatttctaacgctaggaatggttgtatacctcttagtgtcattccactgtgtgcttcaaataaacttcgcgttgtaattcctgacttcaccgtctggaatcaggtagtcacatatccctcgcttaactacgctggggctttgtgggacattacagttataaacaatgtggacaatgaaattgttaagtcttcagatgttgtagacagcaatgaaaatttaacatggccacttgttttagaatgcactagggcatccacttctgccgttaagttgcaaaataatgagatcaaaccttcaggtttaaaaaccatggttgtgtctgcaggtcaagagcaaactaactgtaatactagttccttagcttattacgaacctgtgcagggtcgtaaaatgctgatggctcttctttctgataatgcctatctcaaatgggcgcgtgttgaaggtaaggacggatttgttagtgtagagctacaacctccttgcaaattcttgattgcgggaccaaaaggacctgaaatccgatatctctattttgttaaaaatcttaacaaccttcatcgcgggcaagtgttagggcacattgctgcgactgttagattgcaagctggttctaacaccgagtttgcctctaattcttcggtgttgtcacttgttaacttcaccgttgatcctcaaaaagcttatctcgatttcgtcaatgcgggaggtgccccattgacaaattgtgttaagatgcttactcctaaaactggtacaggtatagctatatctgttaaaccagagagtacagctgatcaagagacttatggtggagcttcagtgtgtctctattgccgtgcgcatatagaacatcctgatgtctctggtgtttgtaaatataagggtaagtttgtccaaatccctgctcagtgtgtccgtgaccctgtgggattttgtttgtcaaataccccctgtaatgtctgtcaatattggattggatatgggtgcaattgtgactcgcttaggcaagcagcactgccccaatctaaagattccaattttttaaacgagtccggggttctattgtaaatgcccgaatagaaccctgttcaagtggtttgtccactgatgtcgtctttagggcatttgacatctgcaactataaggctaaggttgctggtattggaaaatactacaagactaatacttgtaggtttgtagaattagatgaccaagggcatcatttagactcctattttgtcgttaagaggcatactatggagaattatgaactagagaagcactgttacgatttgttacgtgactgtgatgctgtagctccccatgatttcttcatctttgatgtagacaaagttaaaacacctcatattgtacgtcagcgtttaactgagtacactatgatggatcttgtatatgccctgaggcactttgatcaaaatagcgaagtgcttaaggctatcttagtgaagtatggttgctgtgatgttacctactttgaaaataaactctggtttgattttgttgaaaatcccagtgttattggtgtttatcataaacttggagaacgtgtacgccaagctatcttaaacactgttaaattttgtgaccacatggtcaaggctggtttagtcggtgtgctcacactagacaaccaggaccttaatggcaagtggtatgattttggtgacttcgtaatcactcaacctggttcaggagtagctatagttgatagctactattcttatttgatgcctgtgctctcaatgaccgattgtctggccgctgagacacatagggattgtgattttaataaaccactcattgagtggccacttactgagtatgattttactgattataaggtacaactctttgagaagtactttaaatattgggatcagacgtatcacgcaaattgcgttaattgtactgatgaccgttgtgtgttacattgtgctaatttcaatgtattgtttgctatgaccatgcctaagacttgtttcggacccatagtccgaaagatctttgttgatggcgtgccatttgtagtatcttgtggttatcactacaaagaattaggtttagtcatgaatatggatgttagtctccatagacataggctctctcttaaggagttgatgatgtatgccgctgatccagccatgcacattgcctcctctaacgcttttcttgatttgaggacatcatgttttagtgtcgctgcacttacaactggtttgacttttcaaactgtgcggcctggcaattttaaccaagacttctatgatttcgtggtatctaaaggtttctttaaggagggctcttcagtgacgctcaaacattttttctttgctcaagatggtaatgctgctattacagattataattactattcttataatctgcctactatgtgtgacatcaaacaaatgttgttctgcatggaagttgtaaacaagtacttcgaaatctatgacggtggttgtcttaatgcttctgaagtggttgttaataatttagacaagagtgctggccatccttttaataagtttggcaaagctcgtgtctattatgagagcatgtcttaccaggagcaagatgaactctttgccatgacaaagcgtaacgtcattcctaccatgactcaaatgaatctaaaatatgctattagtgctaagaatagagctcgcactgttgcaggcgtgtccatacttagcacaatgactaatcgccagtaccatcagaaaatgcttaagtccatggctgcaactcgtggagcgacttgcgtcattggtactacaaagttctatggtggctgggatttcatgcttaaaacattgtacaaagatgttgataatccgcatcttatgggttgggattaccctaagtgtgatagagctatgcctaatatgtgtagaatcttcgcttcactcatattagctcgtaaacatggcacttgttgtactacaagggacagattttatcgcttggcaaatgagtgtgctcaggtgctaagcgaatatgttctatgtggtggtggttactacgtcaaacctggaggtaccagtagcggagatgccaccactgcatatgccaatagtgtctttaacattttgcaggcgacaactgctaatgtcagtgcacttatgggtgctaatggcaacaagattgttgacaaagaagttaaagacatgcagtttgatttgtatgtcaatgtttacaggagcactagcccagaccccaaatttgttgataaatactatgcttttcttaataagcacttttctatgatgatactgtctgatgacggtgtcgtttgctataatagtgattatgcagctaagggttacattgctggaatacagaatttcaaggaaacgctgtattatcagaacaatgtctttatgtctgaagctaaatgctgggtggaaaccgatctgaagaaagggccacatgaattctgttcacagcatacgctttatattaaggatggcgacgatggttacttccttccttatccagacccttcaagaattttgtctgccggttgctttgtagatgatatcgttaagactgacggtacactcatggtagagcggtttgtgtctttggctatagatgcttaccctctcacaaagcatgaagatatagaataccagaatgtattctgggtctacttacagtatatagaaaaactgtataaagaccttacaggacacatgcttgacagttattctgtcatgctatgtggtgataattctgctaagttttgggaagaggcattctatagagatctctatagttcgcctaccactttgcaggctgtcggttcatgcgttgtatgccattcacagacttccctacgctgtgggacatgcatccgtagaccatttctctgctgtaaatgctgctatgatcatgttatagcaactccacataagatggttttgtctgtttctccttacgtttgtaatgcccctggttgtggcgtttcagacgttactaagctatatttaggtggtatgagctacttttgtgtagatcatagacctgtgtgtagttttccactttgcgctaatggtcttgtattcggcttatacaagaatatgtgcacaggtagtccttctatagttgaatttaataggttggctacctgtgactggactgaaagtggtgattacacccttgccaatactacaacagaaccactcaaactttttgctgctgagactttacgtgccactgaagaggcgtctaagcagtcttatgctattgccaccatcaaagaaattgttggtgagcgccaactattacttgtgtgggaggctggcaagtccaaaccaccactcaatcgtaattatgtttttactggttatcatataaccaaaaatagtaaagtgcagctcggtgagtacatcttcgagcgcattgattatagtgatgctgtatcctacaagtctagtacaacgtataaactgactgtaggtgacatcttcgtacttacctctcactctgtggctaccttgacggcgcccacaattgtgaatcaagagaggtatgttaaaattactgggttgtacccaaccattacggtacctgaagagttcgcaagtcatgttgccaacttccaaaaatcaggttatagtaaatatgtcactgttcagggaccacctggcactggcaaaagtcattttgctatagggttagcgatttactaccctacagcacgtgttgtttatacagcatgttcacacgcagctgttgatgctttgtgtgaaaaagcttttaaatatttgaacattgctaaatgttcccgtatcattcctgcaaaggcacgtgttgagtgctatgacaggtttaaagttaatgagacaaattctcaatatttgtttagtactattaatgctctaccagaaacttctgccgatattctggtggttgatgaggttagtatgtgcactaattatgatctttcaattattaatgcacgtattaaagctaagcacattgtctatgtaggagatccagcacagttgccagctcctaggactttgttgactagaggcacattggaaccagaaaatttcaatagtgtcactagattgatgtgtaacttaggtcctgacatatttttaagtatgtgctacaggtgtcctaaggaaatagtaagcactgtgagcgctcttgtctacaataataaattgttagccaagaaggagctttcaggccagtgctttaaaatactctataagggcaatgtgacgcatgatgctagctctgccattaatagaccacaactcacatttgtgaagaattttattactgccaatccggcatggagtaaggcagtctttatttcgccttataattcacagaatgctgtggctcgttcaatgctgggtcttactactcagactgttgattcctcacagggttcagaataccagtacgttatcttctgtcaaacagcagatacggcacatgctaacaacattaacagatttaatgttgcaatcactcgtgcccaaaaaggtattctttgtgttatgacatctcaggcactctttgagtccttagagtttactgaattgtcttttactaattacaagctccagtctcagattgtaactggcctttttaaagattgctctagagaaacttctggcctctcacctgcttatgcaccaacatacgttagtgttgatgacaagtataagacgagtgatgagctttgcgtgaatcttaatttacccgcaaatgtcccatactctcgtgttatttccaggatgggctttaaactcgatgcaacagttcctggatatcctaagcttttcattactcgtgaagaggctgtaaggcaagttcgaagctggataggcttcgatgttgagggtgctcatgcttcccgtaatgcatgtggcaccaatgtgcctctacaattaggattttcaactggtgtgaactttgttgttcagccagttggtgttgtagacactgagtggggtaacatgttaacgggcattgctgcccgtcctccaccaggtgaacagtttaagcacctcgtgcctcttatgcataagggggctgcgtggcctattgttagacgacgtatagtgcaaatgttgtcagacactttagacaaattgtctgattactgtacgtttgtttgttgggctcatggctttgaattaacgtctgcatcatacttttgcaagataggtaaggaacagaagtgttgcatgtgcaatagacgcgctgcagcgtactcttcacctctgcaatcttatgcctgctggactcattcctgcggttatgattatgtctacaaccctttctttgtcgatgttcaacagtggggttatgtaggcaatcttgctactaatcacgatcgttattgctctgtccatcaaggagctcatgtggcttctaatgatgcaataatgactcgttgtttagctattcattcttgttttatagaacgtgtggattgggatatagagtatccttatatctcacatgaaaagaaattgaattcctgttgtagaatcgttgagcgcaacgtcgtacgtgctgctcttcttgccggttcatttgacaaagtctatgatattggcaatcctaaaggaattcctattgttgatgaccctgtggttgattggcattattttgatgcacagcccttgaccagaaaggtacaacagcttttctatacagaggacatggcctcaagatttgctgatgggctctgcttattttggaactgtaatgtaccaaaatatcctaataatgcaattgtatgcaggtttgacacacgtgtgcattctgagttcaatttgccaggttgtgatggcggtagtttgtatgttaacaagcacgcttttcatacaccagcatatgatgtgagtgcattccgtgatctgaaacctttaccattcttttattattctactacaccatgtgaagtgcatggtaatggtagtatgatagaggatattgattatgtacccctaaaatctgcagtctgtattacagcttgtaatttagggggcgctgtttgtaggaagcatgctacagagtacagagagtatatggaagcatataatcttgtctctgcatcaggtttccgcctttggtgttataagacctttgatatttataatctctggtctacttttacaaaagttcaaggtttggaaaacattgcttttaattttgttaaacaaggccattttattggtgttgagggtgaactacctgtagctgtagtcaatgataagatcttcaccaagagtggcgttaatgacatttgtatgtttgagaataaaaccactttgcctactaatatagcttttgaactctatgctaagcgtgctgtacgctcgcatcccgatttcaaattgctacacaatttacaagcagacatttgctacaagttcgtcctttgggattatgaacgtagcaatatttatggtactgctactattggtgtatgtaagtacactgatattgatgttaattcagctttgaatatatgttttgacatacgcgataatggttcattggagaagttcatgtctactcccaatgccatctttatttctgatagaaaaatcaagaaatacccttgtatggtaggtcctgattatgcttacttcaatggtgctatcatccgtgatagtgatgttgttaaacaaccagtgaagttctacttgtataagaaagtcaataatgagtttattgatcctactgagtgtatttacactcagagtcgctcttgtagtgacttcctacccctgtctgacatggagaaagactttctatcttttgatagtgatgttttcattaagaagtatggcttggaaaactatgcttttgagcacgtagtctatggagacttctctcatactacgttaggcggtcttcacttgcttattggtttatacaagaagcaacaggaaggtcatattattatggaagaaatgctaaaaggtagctcaactattcataactattttattactgagactaacacagcggcttttaaggcggtgtgttctgttatagatttaaagcttgacgactttgttatgattttaaagagtcaagaccttggcgtagtatccaaggttgtcaaggttcctattgacttaacaatgattgagtttatgttatggtgtaaggatggacaggttcaaaccttctaccctcgactccaggcttctgcagattggaaacctggtcatgcaatgccatccctctttaaagttcaaaatgtaaaccttgaacgttgtgagcttgctaattacaagcaatctattcctatgcctcgcggtgtgcacatgaacatcgctaaatatatgcaattgtgccagtatttaaatacttgcacattagccgtgcctgccaatatgcgtgttatacattttggcgctggttctgataaaggtatcgctcctggtacatcagttttacgacagtggcttcctacagatgccattattatagataatgatttaaatgagttcgtgtcagatgctgacataactttatttggagattgtgtaactgtacgtgtcggccaacaagtggatcttgttatttccgacatgtatgatcctactactaagaatgtaacaggtagtaatgagtcaaaggctttattctttacttacctgtgtaacctcattaataataatcttgctcttggtgggtctgttgctattaaaataacagaacactcttggagcgttgaactttatgaacttatgggaaaatttgcttggtggactgttttctgcaccaatgcaaatgcatcctcatctgaaggattcctcttaggtattaattacttgggtactattaaagaaaatatagatggtggtgctatgcacgccaactatatattttggagaaattccactcctatgaatctgagtacttactcactttttgatttatccaagtttcaattaaaattaaaaggaacaccagttcttcaattaaaggagagtcaaattaacgaactcgtaatatctctcctgtcgcagggtaagttacttatccgtgacaatgatacactcagtgtttctactgatgttcttgttaacacctacagaaagttacgttgatgtagggccagattctgttaagtctgcttgtattgaggttgatatacaacagactttctttgataaaacttggcctaggccaattgatgtttctaaggctgacggtattatataccctcaaggccgtacatattctaacataactatcacttatcaaggtctttttccctatcagggagaccatggtgatatgtatgtttactctgcaggacatgctacaggcacaactccacaaaagttgtttgtagctaactattctcaggacgtcaaacagtttgctaatgggtttgtcgtccgtataggagcagctgccaattccactggcactgttattattagcccatctaccagcgctactatacgaaaaatttaccctgcttttatgctgggttcttcagttggtaatttctcagatggtaaaatgggccgcttcttcaatcatactctagttcttttgcccgatggatgtggcactttacttagagctttttattgtattctagagcctcgctctggaaatcattgtcctgctggcaattcctatacttcttttgccacttatcacactcctgcaacagattgttctgatggcaattacaatcgtaatgccagtctgaactcttttaaggagtattttaatttacgtaactgcacctttatgtacacttataacattaccgaagatgagattttagagtggtttggcattacacaaactgctcaaggtgttcacctcttctcatctcggtatgttgatttgtacggcggcaatatgtttcaatttgccaccttgcctgtttatgatactattaagtattattctatcattcctcacagtattcgttctatccaaagtgatagaaaagcttgggctgccttctacgtatataaacttcaaccgttaactttcctgttggatttttctgttgatggttatatacgcagagctatagactgtggttttaatgatttgtcacaactccactgctcatatgaatccttcgatgttgaatctggagtttattcagtttcgtctttcgaagcaaaaccttctggctcagttgtggaacaggctgaaggtgttgaatgtgatttttcacctcttctgtctggcacacctcctcaggtttataatttcaagcgtttggtttttaccaattgcaattataatcttaccaaattgctttcacttttttctgtgaatgattttacttgtagtcaaatatctccagcagcaattgctagtaactgttattcttcactgattttggattatttttcatacccacttagtatgaaatccgatctcagtgttagttctgctggtccaatatcccagtttaattataaacagtccttttctaatcccacatgtttgattttagcgactgttcctcataaccttactactattactaagcctcttaagtacagctatattaacaagtgctctcgttttctttctgatgatcgtactgaagtacctcagttagtgaacgctaatcaatactcaccctgtgtatccattgtcccatccactgtgtgggaagacggtgattattataggaaacaactatctccacttgaaggtggtggctggcttgttgctagtggctcaactgttgccatgactgagcaattacagatgggctttggtattacagttcaatatggtacagacaccaatagtgtttgccccaagcttgaatttgctaatgacacaaaaattgcctctcaattaggcaattgcgtggaatattccctctatggtgtttcgggccgtggtgtttttcagaattgcacagctgtaggtgttcgacagcagcgctttgtttatgatgcgtaccagaatttagttggctattattctgatgatggcaactactactgtttgcgtgcttgtgttagtgttcctgtttctgtcatctatgataaagaaactaaaacccacgctactctatttggtagtgttgcatgtgaacacatttcctctaccatgtctcaatactcccgttctacgcgatcaatgcttaaacggcgagattctacatatggcccccttcagacacctgttggttgtgtcctaggacttgttaattcctctttgttcgtagaggactgcaagttgcctcttggtcaatctctctgtgctcttcctgacacacctagtactctcacacctcgcagtgtgcgctctgttccaggtgaaatgcgcttggcatccattgcttttaatcatcctattcaggttgatcaacttaatagtagttattttaaattaagtatacccactaatttttcctttggtgtgactcaggagtacattcagacaaccattcagaaagttactgttgattgtaaacagtacgtttgcaatggtttccagaagtgtgagcaattactgcgcgagtatggccagttttgttccaaaataaaccaggctctccatggtgccaatttacgccaggatgattctgtacgtaatttgtttgcgagcgtgaaaagctctcaatcatctcctatcataccaggttttggaggtgactttaatttgacacttctagaacctgtttctatatctactggcagtcgtagtgcacgtagtgctattgaggatttgctatttgacaaagtcactatagctgatcctggttatatgcaaggttacgatgattgcatgcagcaaggtccagcatcagctcgtgatcttatttgtgctcaatatgtggctggttacaaagtattacctcctcttatggatgttaatatggaagccgcgtatacctcatctttgcttggcagcatagcaggtgttggctggactgctggcttatcctcctttgctgctattccatttgcacagagtatcttttataggttaaacggtgttggcattactcaacaggttctttcagagaaccaaaagcttattgccaataagtttaatcaggctctgggagctatgcaaacaggcttcactacaactaatgaagcttttcacaaggttcaggatgctgtgaacaacaatgcacaggctctatccaaattagctagcgagctatctaatacttttggtgctatttccgcctctattggagacatcatacaacgtcttgatgttctcgaacaggacgcccaaatagacagacttattaatggccgtttgacaacactaaatgcttttgttgcacagcagcttgttcgttccgaatcagctgctctttcggctcaattggctaaagataaagtcaatgagtgtgtcaaggcacaatccaagcgttctggattttgcggtcaaggcacacatatagtgtcctttgttgtaaatgcccctaatggcctttacttcatgcatgttggttattaccctagcaaccacattgaggttgtttctgcttatggtctttgcgatgcagctaaccctactaattgtatagcccctgttaatggctactttattaaaactaataacactaggattgttgatgagtggtcatatactggctcgtccttctatgcacctgagcccatcacctctcttaatactaagtatgttgcaccacaggtgacataccaaaacatttctactaacctccctcctcctcttctcggcaattccaccgggattgacttccaagatgagttggatgagtttttcaaaaatgttagcaccagtatacctaattttggttctctaacacagattaatactacattactcgatcttacctacgagatgttgtctcttcaacaagttgttaaagcccttaatgagtcttacatagaccttaaagagcttggcaattatacttattacaacaaatggccgtggtacatttggcttggtttcattgctgggcttgttgccttagctctatgcgtcttcttcatactgtgctgcactggttgtggcacaaactgtatgggaaaacttaagtgtaatcgttgttgtgatagatacgaggaatacgacctcgagccgcataaggttcatgttcactaattaacgaactatcaatgagagttcaaagaccacccactctcttgttagtgttctcactctctcttttggtcactgcattttcaaaacctctctatgtacctgagcattgtcagaattattctggttgcatgcttagggcttgtattaaaactgcccaagctgatacagctggtctttatacaaattttcgaattgacgtcccatctgcagaatcaactggtactcaatcagtttctgtcgatcgtgagtcaacttcaactcatgatggtcctaccgaacatgttactagtgtgaatctttttgacgttggttactcagttaattaacgaactctatggattacgtgtctctgcttaatcaaatttggcagaagtaccttaattcaccgtatactacttgtttgtatatccctaaacccacagctaagtatacacctttagttggcacttcattgcaccctgtgctgtggaactgtcagctatcctttgctggttatactgaatctgctgttaattctacaaaagctttggccaaacaggacgcagctcagcgaatcgcttggttgctacataaggatggaggaatccctgatggatgttccctctacctccggcactcaagtttattcgcgcaaagcgaggaagaggagtcattctccaactaagaaactgcgctacgttaagcgtagattttctcttctgcgccctgaagaccttagtgttattgtccaaccaacacactatgtcagggttacattttcagaccccaacatgtggtatctacgttcgggtcatcatttacactcagttcacaattggcttaaaccttatggcggccaacctgtttctgagtaccatattactctagctttgctaaatctcactgatgaagatttagctagagatttttcacccattgcgctctttttgcgcaatgtcagatttgagctacatgagttcgccttgctgcgcaaaactcttgttcttaatgcatcagagatctactgtgctaacatacatagatttaagcctgtgtatagagttaacacggcaatccctactattaaggattggcttctcgttcagggattttccctttaccatagtggcctccctttacatatgtcaatctctaaattgcatgcactggatgatgttactcgcaattacatcattacaatgccatgctttagaacttatcctcaacaaatgtttgttactcctttggccgtagatgttgtctccatacggtcttccaatcagggtaataaacaaattgttcattcttaccccattttacatcatccaggattttaacgaactatggctttctcggcgtctttatttaaacccgtccagctagtcccagtttctcctgcatttcatcgcattgagtctactgactctattgttttcacatacattcctgctagcggctatgtagctgctttagctgtcaatgtgtgtctcattcccctattattactgctacgtcaagatacttgtcgtcgcagcattatcagaactatggttctctatttccttgttctgtataactttttattagccattgtactagtcaatggtgtacattatccaactggaagttgcctgatagccttcttagttatcctcataatactttggtttgtagatagaattcgtttctgtctcatgctgaattcctacattccactgtttgacatgcgttctcactttattcgtgttagtacagtttcttctcatggtatggtccctgtcatacacaccaaaccattatttattagaaacttcgatcagcgttgcagctgttctcgttgtttttatttgcactcttccacttatatagagtgcacttatattagccgttttagtaagattagcctagtttctgtaactgacttctccttaaacggcaatgtttccactgttttcgtgcctgcaacgcgcgattcagttcctcttcacataatcgccccgagctcgcttatcgtttaagcagctctgcgctactatgggtcccgtgtagaggctaatccattagtctctctttggacatatggaaaacgaactatgttaccctttgtccaagaacgaatagggttgttcatagtaaactttttcatttttaccgtagtatgtgctataacactcttggtgtgtatggctttccttacggctactagattatgtgtgcaatgtatgacaggcttcaataccctgttagttcagcccgcattatacttgtataatactggacgttcagtctatgtaaaattccaggatagtaaaccccctctaccacctgacgagtgggtttaacgaactccttcataatgtctaatatgacgcaactcactgaggcgcagattattgccattattaaagactggaactttgcatggtccctgatctttctcttaattactatcgtactacagtatggatacccatcccgtagtatgactgtctatgtctttaaaatgtttgttttatggctcctatggccatcttccatggcgctatcaatatttagcgccgtttatccaattgatctagcttcccagataatctctggcattgtagcagctgtttcagctatgatgtggatttcctactttgtgcagagtatccggctgtttatgagaactggatcatggtggtcattcaatcctgagactaattgccttttgaacgttccatttggtggtacaactgtcgtacgtccactcgtagaggactctaccagtgtaactgctgttgtaaccaatggccacctcaaaatggctggcatgcatttcggtgcttgtgactacgacagacttcctaatgaagtcaccgtggccaaacccaatgtgctgattgctttaaaaatggtgaagcggcaaagctacggaactaattccggcgttgccatttaccatagatataaggcaggtaattacaggagtccgcctattacggcggatattgaacttgcattgcttcgagcttaggctctttagtaagagtatcttaattgattttaacgaatctcaatttcattgttatggcatcccctgctgcacctcgtgctgtttcctttgccgataacaatgatataacaaatacaaacctgtctcgaggtagaggacgtaatccaaaaccacgagctgcaccaaataacactgtctcttggtacactgggcttacccaacacgggaaagtccctcttacctttccacctgggcagggtgtacctcttaatgccaattccacccctgcgcaaaatgctgggtattggcggagacaggacagaaaaattaataccgggaatggaattaagcaactggctcccaggtggtacttctactacactggaactggacccgaagcagcactcccattccgggctgttaaggatggcatcgtttgggtccatgaagatggcgccactgatgctccttcaacttttgggacgcggaaccctaacaatgattcagctattgttacacaattcgcgcccggtactaagcttcctaaaaacttccacattgaggggactggaggcaatagtcaatcatcttcaagagcctctagcgtaagcagaaactcttccagatctagttcacaaggttcaagatcaggaaactctacccgcggcacttctccaggtccatctggaatcggagcagtaggaggtgatctactttaccttgatcttctgaacagactacaagcccttgagtctggcaaagtaaagcaatcgcagccaaaagtaatcactaagaaagatgctgctgctgctaaaaataagatgcgccacaagcgcacttccaccaaaagtttcaacatggtgcaagcttttggtcttcgcggaccaggagacctccagggaaactttggtgatcttcaattgaataaactcggcactgaggacccacgttggccccaaattgctgagcttgctcctacagccagtgcttttatgggtatgtcgcaatttaaacttacccatcagaacaatgatgatcatggcaaccctgtgtacttccttcggtacagtggagccattaaacttgacccaaagaatcccaactacaataagtggttggagcttcttgagcaaaatattgatgcctacaaaaccttccctaagaaggaaaagaaacaaaaggcaccaaaagaagaatcaacagaccaaatgtctgaacctcctaaggagcatcgtgtgcaaggtactcagcgcactcgcacccgtccaagtgttcagcctggtccaatgattgatgttaacactgattagtgtcactcaaagtaacaagatcgcggcaatcgtttgtgtttggtaaccccatctcaccatcgcttgtccactcttgcacagaatggaatcatgttgtaattacagtgcaataaggtaattataacccatttaattgatagctatgctttattaaagtgtgtagctgtagagagaatgttaaagactgtcacctctgcgtgattgcaagtgaacagtgccccccgggaagagctctacagtgtgaaatgtaaataaaaatagctattattcaattagattaggctaattagatgatttgcaaaaaaaaaaaa

SEQ ID NO: 4 - DNA, 30096 bp, Artificial Sequence
  MERS Isolate Hu/Riyadh-KSA-13127/2016
atctcacttcccctcgttctcttgcagaactttgattttaacgaacttaaataaaagccctgttgtttagcgtattgttgcacttgtctggtgggattgtggcactaatctgcctgctcatctaggcagtggacatatgctcaacactgggtataattctaattgaatactatttttcagttagagcgtcgtgtctcttgtacgtctcggtcacaatatacggtttcgtccggtgcgtggcaattcggggcacatcatgtctttcgtggctggtgtgatcgcgcaaggtgcgcgcggtacgtatcgagcagcgctcaactctgaaaaacatcaagaccatgtgtctctaactgtgccactctgtggttcaggaaacctggttgaaaaactttcaccatggttcatggatggcgaaaatgcctatgaagtggtgaaggccatgttacttaaaaaagagccacttctctatgtgcccatccggctggctggacacactagacacctcccaggtcctcgtgtgtacctggttgagaggctcattgcttgtgaaaatccattcatggttaaccaattggcttatagctctagtgcaaatggcagcctggttggcacaactttgcagggcaagcctattggtatgttcttcccttatgacatcgaacttgtcacaggaaagcaaaatattctcctgcgcaagtatggccgtggtggttatcactacaccccagtccactatgagcgagacaacacctcttgccctgagtggatggacgattttgaggcggatcctaaaggcaaatatgcccagaatctgcttaagaagttgattggcggtgatgtcactccagttgaccaatacatgtgtggcgttgatggaaaacccattagtgcctacgcatttttaatggccaaggatggaataaccaaactggctgatgttgaagcggacgtcgcagcacgtgctgatgacgaaggcttcatcacattaaagaacaatctatatagattggtttggcatgttgagcgtaaagacgttccatatcctaagcaatctatttttactattaatagtgtggtccaaaaggatggtgttgaaaacactcctcctcactattttactcttggatgcaaaattttaacgctcaccccacgtaacaagtggagtggcgtttctgacttgtccctcaaacaaaaactcctttacaccttctatggtaaggagtcacttgagaacccaacctacatttaccactccgcattcattgagtgtggaagttgtggtaatgattcctggcttacagggaatgctatccaagggtttgcctgtggatgtggggcatcatatacagctaatgatgttgaagtccaatcatctggcatgattaagccaaatgctcttctttgtgctacttgcccctttgctaagggtgacagctgttcttctaattgcaaacattcagttgctcagttggttagttacctttctgaacgctgtaatgttattgctgattctaagtccttcacacttatctttggtggcgtagcttacgcctactttggatgtgaggaaggtactatgtactttgtgcctagagctaagtctgttgtctcaaggattggagactccatctttacaggctgtactggctcttggaacaaggtcactcaaattgctaacatgttcttggaacagactcagcattcccttaactttgtgggagagttcgttgtcaacgatgttgtcctcgcaattctctctggaaccacaactaatgttgacaaaatacgccagcttctcaaaggtgtcaccattgacaagttgcgtgattatttagctgactatgacgtagcagtcactgccggcccattcatggataatgctattaatgttggtggtacaggattacagtatgccgccattactgcaccttatgtagttctcactggcttaggtgagtcctttaagaaagttgcaaccataccgtacaaggtttgcaactctgttaaggatactctgacttattatgctcacagcgtgttgtacagagtttttccttatgacatggattctggtgtgtcatcctttagtgaactactttttgattgcgttgatctttcagtagcttctacctattttttagtccgcctcttgcaagataagactggcgactttatgtctacaattattacttcctgccaaactgctgttagtaagcttctagatacatgttttgaagctacagaagcaacatttaacttcttgttagatttggcaggattgttcagaatctttcttcgcaatgcctatgtgtacacttcacaagggtttgtggtggtcaatggcaaagtttctacacttgtcaaacaagtgttagacttgcttaataagggtatgcaacttttgcatacaaaggtctcctgggctggttctaacatcagtgctgttatctacagcggcagggagtctctaatattcccatcgggaacctattactgtgtcaccactaaggctaagtccgttcaacaagatcttgacgttattttgcctggtgagttttccaagaagcagttaggactgctccaacctactgacaattctacaactgttagtgttactgtatccagtaacatggttgaaactgttgtgggtcaacttgagcaaactaatatgcacagtcctgatgttatagtaggtgactatgtcattattagtgaaaaattgtttgtgcgtagtaaggaagaagacggattcgccttctaccctgcttgcactaatggtcatgctgtaccgactctctttagacttaagggaggtgcacctgtaaaaaaagtagcctttggcggtgatcaagtacatgaggttgctgctgtaagaagtgttactgtcgagtacaacattcatgctgtattagacacactacttgcttcttctagtcttagaacctttgttgtagataagtctttgtcaattgaggagtttgctgacgtagtaaaggaacaagtctcagacttgcttgttaaattactgcgtggaatgccgattccagattttgatttagacgattttattgacgcaccatgctattgctttaacgctgagggtgatgcatcttggtcttctactatgatcttctctcttcaccccgtcgagtgtgacgaggagtgttctgaagtagaggcttcagatttagaagaaggtgaatcagagtgcatttctgagacttcaactgaacaagttgacgtttctcatgaggtttctgacgacgagtgggctgctgcagttgatgaagcgttccccctcgatgaagcagaagatgttactgaatctgtgcaagaagaagcacaaccagtagaagtacctgttgaagatattgtgcaggttgtcatagttgacaccttacaggaaactcctgttgtgtctgatactgttgaagtcccaccgcaagtggtgaaacttccgtctgaacctcagactatccagcccgaggtaaaagaagttgcacctgtctatgaggctgataccgaacagacacagagtgttactgttaaacctaagaggttacgcaaaaagcgtaatgttgaccctttgtccaattttgaacataaggttattacagagtgcgttaccatagttttaggtgacgcaattcaagtagccaagtgctatggggagtctgtgttagttaatgctgctaacacacatcttaagcatggcggtggtatcgctggtgctattaatgcggcttcaaaaggggctgtccaaaaagagtcagatgagtatattctggctaaagggccgttacaagtaggagattcagttctcttgcaaggccattctctagctaagaatatcctgcatatcgtaggcccagatgcccgcgctaaacaggatgtttctctccttagtaagtgctataaggctatgaatgcatatcctcttgtagtcactcctcttgtttcaacaggcatatttggtgtaaaaccagctgtgtcttttgattatcttattagagaggctaagactagagttttagtcgtcgttaattcccaagatgtctataagagtcttaccatagttgacattccacagagtttgactttttcatatgatgggttacgtggcgcaatacgtaaagctaaagattatggttttactgtttttgtgtgcacagacaactctgctaacactaaagttcttaggaacaagggtgttgattatactaagaagtttcttacagttgacggtgtgcaatattattgctacacgtctaaggacactttagatgatatcttacaacaggctaataagtctgttggtattatatctatgcctttgggatatgtgtctcatggtttagacttaattcaagcagggagtgtcgtgcgtagagttaacgtgccctacgtgtgtctcctagctaataaagagcaagaagctattttgatgtctgaagacgttaagttaaacccttcagaagattttataaagcacgtccgcactaatggtggttacaattcttggcatttagtcgagggtgaactattggtgcaagacttacgcttaaataagctcctgcattggtctgatcaaaccatatgctacaaggatagtgtgttttatgttgtaaagaatagtacagcttttccatttgaaacactttcagcatgtcgtgcgtatttggattcacgcacgacacagcagttaacaatcgaagtcttagtgactgtcgatggtgtaaattttagaacagtcgttctaaataataagaacacttatagatcacagcttggatgcgttttctttaatggtgctgatatttctgataccattcctgatgagaaacagaatggtcacagtttatatctagcagacaatttgactgctgatgaaacaaaggcgcttaaagagttatatggccccgttgatcctactttcttacacagattctattcacttaaggctgcagtccataagtggaagatggttgtgtgtgataaggtacgttctctcaaattgagtgataataattgttatcttaatgcagttattatgacacttgatttattgaaggacattaaatttgttatacctgctctacagcatgcatttatgaaacataagggcggtgattcaactgacttcatagccctcattatggcttatggcaattgcacatttggtgctccagatgatgcctctcggttacttcataccgtgcttgcaaaggctgagttatgctgttctgcacgcatggtttggagagagtggtgcaatgtctgtggcataaaagatgttgttctacaaggcttaaaagcttgttgttacgtgggtgtgcaaactgttgaagatctgcgtgctcgcatgacatatgtatgccagtgtggtggtgaacgtcatcggcaaatagtcgaacacaccaccccctggttgctgctctcaggcacaccaaatgaaaaattggtgacaacctccacggcgcctgattttgtagcgtttaatgtctttcagggcattgaaacggctgttggccattatgttcatgctcgcctgaagggtggtcttattttaaagtttgactctggcaccgttagcaagacttcagactggaagtgcaaggtgacagatgtacttttccccggccaaaaatacagtagcgattgtaatgtcgtacggtattctttggacggtaatttcagaacagaggttgatcccgacctatctgctttctatgttaaggatggtaaatactttacaagtgcaccacccgtaacatattcaccagctacaattttagctggtagtgtctacactaatagctgccttgtatcgtctgatggacaacctggcggtgatgctattagtttgagttttaataaccttttagggtttgattctagtaaaccagtcactaagaaatacacttactccttcttgcctaaagaagacggcgatgtgttgttggctgagtttgacacttatgaccctatttataagaatggtgccatgtataaaggcaaaccaattctttgggtcaacaaagcatcttatgatactaatcttaataagttcaatagagctagtttgcgtcaaatttttgacgtagcccccattgaactcgaaaataaattcacacctttgagtgtggcgtccacaccagttgaacctccaactgtagatgtggtagcacttcaacaggaaatgacaattgtcaaatgtaagggtttaaataaacctttcgtgaaggacaatgtcagtttcgttgttgatgactcaggtactcccgttgttgagtatctgtctaaagaagatctacatacattgtatgtagaccctaagtatcaagtcattgtcttaaaagacaatgtactttcttctatgcttagattgcacaccgttgagtcaggtgatattaacgttgttgcagcttccggatctttgacacgtaaagtgaagttactatttagggcttcattttatttcaaagaatttgctacccgcactttcactgctaccactgctgtaggtagttgtataaagagtgtagtgcggcatctaggtgttactaaaggcatattgacaggctgttttagttttgtcaagatgttatttattcttccactagcttactttagtgattcaaaactcggcaccacagaggttaaagtgagtgctttgaaaacagctggcgttgtgacaggtaatgttgtaaaacagtgttgcactgctgctgttgatttaagtatggataagttgcgccgtgtggattggaaatcaaccctacggttgttacttatgttatgcacaactatggtattgttgtcttctgtgtatcacttgtatgtcttcaatcaggtcttatcaagtgatgttatgtttgaagatgcccaaggtttgaaaaagttctacaaagaagttagagcttacctaggaatctcttctgcttgtgacggtcttgcttcagcttatagggcgaattcatttgatgtacctacattctgcgcaaaccgttctgcaatgtgtaattggtgcttgattagccaagattccataactcactacccagctcttaagatggttcaaacacatcttagccactatgttcttaacatagattggttgtggtttgcatttgagactggtttggcatacatgctctatacctcggccttcaactggttgttgttggcaggtacattgcattatttctttgcacagacttccatatttgtagactggcggtcatacaattatgctgtgtctagtgccttctggttattcacccacattccaatggcgggtttggtacgaatgtataatttgttagcatgcctttggcttttacgcaagttttatcagcatgtaatcaatggttgcaaagatacggcatgcttgctctgctataagaggaaccgacttactagagttgaagcttctaccgttgtctgtggtggaaaacgtacgttttatatcacagcaaatggcggtatttcattctgtcgtaggcataattggaattgtgtggattgtgacattgcaggtgtggggaataccttcatctgtgaagaagtcgcaaatgacctcactaccgccctacgcaggcctattaacgctacggatagatcacattattatgtggattccgttacagttaaagagactgttgttcagtttaattatcgtagagacggtcaaccattctacgagcggtttcccctctgcgcttttacaaatctagataagttgaagttcaaagaggtctgtaaaactactactggtatacctgaatacaactttatcatctacgactcatcagatcgtggccaggaaagtttagctaggtctgcatgtgtttattattctcaagtcttgtgtaaatcaattcttttggttgactcaagtttggttacttctgttggtgattctagtgaaatcgccactaaaatgtttgattcctttgttaatagtttcgtctcgctgtataatgtcacacgcgataagttggaaaaacttatctctactgctcgtgatggcgtaaggcgaggcgataacttccatagtgtcttaacaacattcattgacgcagcacgaggccccgcaggtgtggagtctgatgttgagaccaatgaaattgttgactctgtgcagtatgctcataaacatgacatacaaattactaatgagagttacaataattatgtaccctcatatgttaaacctgatagtgtgtctaccagtgatttaggtagtctcattgattgtaatgcggcttcagttaaccaaattgtcttgcgtaattctaatggtgcttgtatttggaacgctgctgcatatatgaaactctcggatgcacttaaacgacagattcgcattgcatgccgtaagtgtaatttagctttccggttaaccacctcaaagctacgcgctaatgataatatcttatcagttagattcactgctaacaaaattgttggtggtgctcctacatggtttaatgtgttgcgtgactttacgttaaagggttacgttcttgctaccattattgtgtttctgtgtgctgtactgatgtatttgtgtttacctacattttctatggtacctgttgaattttatgaagaccgcatcttggactttaaagttcttgataatggtatcattagggatgtaaatcctgatgataagtgctttgctaataagcaccggtccttcacacaatggtatcatgagcatgttggtggtgtctatgacaactctatcacatgcccattgacagttgcagtaattgctggagttgctggtgctcgcattccagacgtacctactacattggcttgggtgaacaatcagataattttctttgtttctcgagtctttgctaatacaggcagtgtttgctacactcctatagatgagataccctataagagtttctctgatagtggttgcattcttccatctgagtgcactatgtttagggatgcagagggccgtatgacaccatactgccatgatcctactgttttgcctggggcttttgcgtacagtcagatgaggcctcatgttcgttacgacttgtatgatggtaacatgtttattaaatttcctgaagtagtatttgaaagtacacttaggattactagaactctgtcaactcagtactgccggttcggtagttgtgagtatgcacaagagggtgtttgtattaccacaaatggctcgtgggccatttttaatgaccaccatcttaatagacctggtgtctattgtggctctgattttattgacattgtcaggcggttagcagtatcactgttccagcctattacttatttccaattgactacctcattggtcttgggtataggtttgtgtgcattcctgactttgctcttctattatattaataaagtaaaacgtgcttttgcagattacacccagtgtgctgtaattgctgttgttgctgctgttcttaatagcttgtgcatctgctttgttgcctctataccattgtgtatagtaccttacactgcattgtactattatgctacattctattttactaatgagcctgcatttattatgcatgtttcttggtacattatgttcgggcctatcgttcccatatggatgacctgcgtctatacagttgcaatgtgctttagacacttcttctgggttttagcttattttagtaagaaacatgtagaagtttttactgacggtaagcttaattgtagtttccaggacgctgcctctaatatctttgttattaacaaggacacttatgcagctcttagaaactctttaactaatgatgcctattcacgatttttggggttgtttaacaagtataagtacttctctggtgctatggaaacagccgcttatcgtgaagctgcagcatgtcatcttgctaaagccttacaaacatacagcgagactggtagtgatcttctttaccaaccacccaactgtagcataacctctggcgtgttgcaaagcggtttggtgaaaatgtcacatcccagtggagatgttgaggcttgtatggttcaggttacctgcggtagcatgactcttaatggtctttggcttgacaacacagtctggtgcccacgacacgtaatgtgcccggctgaccagttgtctgatcctaattatgatgccttgttgatttctatgactaatcatagtttcagtgtgcaaaaacacattggcgctccagcaaacttgcgtgttgttggtcatgccatgcaaggcactcttttgaagttgactgtcgatgttgctaaccctagcactccagcctacacttttacaacagtgaaacctggcgcagcatttagtgtgttagcatgctataatggtcgtccgactggtacattcactgttgtaatgcgccctaactacacaattaagggttcctttctgtgtggttcttgtggtagtgttggttacaccaaggagggtagtgtgatcaatttttgttacatgcatcaaatggaacttgctaatggtacacataccggttcagcatttgatggtactatgtatggtgcctttatggataaacaagtgcaccaagttcagttaacagacaaatactgcagtgttaatgtagtagcttggctttacgcagcaatacttaatggttgcgcttggtttgtaaaacctaatcgcactagtgttgtttcttttaatgaatgggctcttgccaaccaattcactgaatttgttggcactcaatccgttgacatgttagctgtcaaaacaggcgttgctattgaacagctgctttatgcgatccaacaactttatactgggttccagggaaagcaaatccttggcagtactatgttggaagatgaattcacacctgaggatgttaatatgcagattatgggtgtggttatgcagagtggtgtgagaaaagttacatatggtactgcgcattggttgttcgcgacccttgtctcaacctatgtgataatcttacaagccactaaatttactttgtggaactacttgtttgagactattcccacacagttgttcccactcttatttgtgactatggccttcgttatgttgttggttaaacacaaacacacctttttgacacttttcttgttgcctgtggctatttgtttgacttatgcaaacatagtctacgagcccactactcccatttcgtcagcgctgattgcagttgcaaattggcttgcccccactaatgcttatatgcgcactacacatactgatattggtgtctacattagtatgtcacttgtattagtcattgtagtgaagagattgtacaacccatcactttctaactttgcgttagcattgtgcagtggtgtaatgtggttgtacacttatagcattggagaagcctcaagccccattgcctatctggtttttgtcactacactcactagtgattatacgattacagtctttgttactgtcaaccttgcaaaagtttgcacttatgccatctttgcttactcaccacagcttacacttgtgtttccggaagtgaagatgatacttttattatacacatgtttaggtttcatgtgtacttgctattttggtgtcttctcttttttgaaccttaagcttagagcacctatgggtgtctatgactttaaggtctcaacacaagagttcagattcatgactgctaacaatctaactgcacctagaaattcttgggaggctatggctctgaactttaagttaataggtattggcggtacaccttgtataaaggttgctgctatgcagtctaaacttacagatcttaaatgcacatctgtggttctcctctctgtgctccaacagttacacttagaggctaatagtagggcctgggctttctgtgttaaatgccataatgatatattggcagcaacagaccccagtgaggctttcgagaaattcgtaagtctctttgccactttaatgactttttctggtaatgtagatcttgatgcgttagctagtgatatttttgacactcctagcgtacttcaagctactctttctgagttttcacacttagctacctttgctgagttggaagctgcgcagaaagcctatcaggaagctatggactctggtgacacctcaccacaagttcttaaggctttgcagaaggctgttaatatagctaaaaacgcctatgagaaggataaggcagtggcccgtaagttagaacgtatggctgatcaggctatgacttctatgtataagcaagcacgtgctgaagacaagaaagcaaaaattgtcagtgctatgcaaactatgttgtttggtatgattaagaagctcgacaacgatgttcttaatggtatcatttctaacgctaggaatggttgtatacctcttagtgtcattccactgtgtgcttcaaataaacttcgcgttgtaattcctgacttcaccgtctggaatcaggtagtcacatatccctcgcttaactacgctggggctttgtgggacattacagttataaacaatgtggacaatgaaattgttaagtcttcagatgttgtagacagcaatgaaaatttaacatggccacttgttttagaatgcactagggcatccacttctgccgttaagttgcaaaataatgagatcaaaccttcaggtttaaaaaccatggttgtgtctgcaggtcaagagcaaactaactgtaatactagttccttagcttattacgaacctgtgcagggtcgtaaaatgctgatggctcttctttctgataatgcctatctcaaatgggcgcgtgttgaaggtaaggacggatttgttagtgtagagctacaacctccttgcaaattcttgattgcgggaccaaaaggacctgaaatccgatatctctattttgttaaaaatcttaacaaccttcatcgcgggcaagtgttagggcacattgctgcgactgttagattgcaagctggttctaacaccgagtttgcctctaattcttcggtgttgtcacttgttaacttcaccgttgatcctcaaaaagcttatctcgatttcgtcaatgcgggaggtgccccattgacaaattgtgttaagatgcttactcctaaaactggtacaggtatagctatatctgttaaaccagagagtacagctgatcaagagacttatggtggagcttcagtgtgtctctattgccgtgcgcatatagaacatcctgatgtctctggtgtttgtaaatataagggtaagtttgtccaaatccctgctcagtgtgtccgtgaccctgtgggattttgtttgtcaaataccccctgtaatgtctgtcaatattggattggatatgggtgcaattgtgactcgcttaggcaagtagcactgccccaatctaaagattccaattttttaaacgagtccggggttctattgtaaatgcccgaatagaaccctgttcaagtggtttgtccactgatgtcgtctttagggcatttgacatctgcaactataaggctaaggttgctggtattggaaaatactacaagactaatacttgtaggtttgtagaattagatgaccaagggcatcatttagactcctattttgtcgttaagaggcatactatggagaattatgaactagagaagcactgttacgatttgttacgtgactgtgatgctgtagctccccatgatttcttcatctttgatgtagacaaagttaaaacacctcatattgtacgtcagcgtttaactgagtacactatgatggatcttgtatatgccctgaggcactttgatcaaaatagcgaagtgcttaaggctatcttagtgaagtatggttgctgtgatgttacctactttgaaaataaactctggtttgattttgttgaaaatcccagtgttattggtgtttatcataaacttggagaacgtgtacgccaagctatcttaaacactgttaaattttgtgaccacatggtcaaggctggtttagtcggtgtgctcacactagacaaccaggaccttaatggcaagtggtatgattttggtgacttcgtaatcactcaacctggttcaggagtagctatagttgatagctactattcttatttgatgcctgtgctctcaatgaccgattgtttggccgctgagacacatagggattgtgattttaataaaccactcattgagtggccacttactgagtatgattttactgattataaggtacaactctttgagaagtactttaaatattgggatcagacgtatcacgcaaattgcgttaattgtactgatgaccgttgtgtgttacattgtgctaatttcaatgtattgtttgctatgaccatgcctaagacttgtttcggacccatagtccgaaagatctttgttgatggcgtgccatttgtagtatcttgtggttatcactacaaagaattaggtttagtcatgaatatggatgttagtctccatagacataggctctctcttaaggagttgatgatgtatgccgctgatccagccatgcacattgcctcctctaacgcttttcttgatttgaggacatcatgttttagtgtcgctgcacttacaactggtttgacttttcaaactgtgcggcctggcaattttaaccaagacttctatgatttcgtggtatctaaaggtttctttaaggagggctcttcagttacgctcaaacattttttctttgctcaagatggtaatgctgctattacagattataattactattcttataatctgcctactatgtgtgacatcaaacaaatgttgttctgcatggaagttgtaaacaagtacttcgaaatctatgacggtggttgtcttaatgcttctgaagtggttgttaataatttagacaagagtgctggccatccttttaataagtttggcaaagctcgtgtctattatgagagcatgtcttaccaggagcaagatgaactctttgccatgacaaagcgtaacgtcattcctaccatgactcaaatgaatctaaaatatgctattagtgctaagaatagagctcgcactgttgcaggcgtgtccatacttagcacaatgactaatcgccagtaccatcagaaaatgcttaagtccatggctgcaactcgtggagcgacttgcgtcattggtactacaaagttctatggtggctgggatttcatgcttaaaacattgtacaaagatgttgataatccgcatcttatgggttgggattaccctaagtgtgatagagctatgcctaatatgtgtagaatcttcgcttcactcatattagctcgtaaacatggcacttgttgtactacaagggacagattttatcgcttggcaaatgagtgtgctcaggtgctaagcgaatatgttctatgtggtggtggttactacgtcaaacctggaggtaccagtagcggagatgccaccactgcatatgccaatagtgtctttaacattttgcaggcgacaactgctaatgtcagtgcacttatgggtgctaatggcaacaagattgttgacaaagaagttaaagacatgcagtttgatttgtatgtcaatgtttacaggagcactagcccagaccccaaatttgttgataaatactatgcttttcttaataagcacttttctatgatgatactgtctgatgacggtgtcgtttgctataatagtgattatgcagctaagggttacattgctggaatacagaattttaaggaaacgctgtattatcagaacaatgtctttatgtctgaagctaaatgctgggtggaaaccgatctgaagaaaggaccacatgaattctgttcacagcatacgctttatattaaggatggcgacgatggttacttccttccttatccagacccttcaagaattttgtctgccggttgctttgtagatgatatcgttaagactgacggtacactcatggtagagcggtttgtgtctttggctatagatgcttaccctctcacaaagcatgaagatatagaataccagaatgtattctgggtctacttacagtatatagaaaaactgtataaagaccttacaggacacatgcttgacagttattctgtcatgctatgtggtgataattctgctaagttttgggaagaggcattctacagagatctctatagttcgcctaccactttgcaggctgtcggttcatgcgttgtatgccattcacagacttccctacgctgtgggacatgcatccgtagaccatttctctgctgtaaatgctgctatgatcatgttatagcaactccacataagatggttttgtctgtttctccttacgtttgtaatgcccctggttgtggcgtttcagacgttactaagctatatttaggtggtatgagctacttttgtgtagatcatagacctgtgtgtagttttccactttgcgctaatggtcttgtattcggcttatacaagaatatgtgcacaggtagtccttctatagttgaatttaataggttggctacctgtgactggactgaaagtggtgattacacccttgccaatactacaacagaaccacttaaactttttgctgctgagactttacgtgccactgaagaggcgtctaagcagtcttatgctattgccaccatcaaagaaattgttggtgagcgccaactattacttgtgtgggaggctggcaagtccaaaccaccactcaatcgtaattatgtttttactggttatcatataaccaaaaatagtaaagtgcagctcggtgagtacatcttcgagcgcattgattatagtgatgctgtatcctacaagtctagtacaacgtataaactgactgtaggtgacatcttcgtacttacctctcactctgtggctaccttgacggcgcccacaattgtgaatcaagagaggtatgttaaaattactgggttgtacccaaccattacggtacctgaagagttcgcaagtcatgttgccaacttccaaaaatcaggttatagtaaatatgtcactgttcagggaccacctggcactggcaaaagtcattttgctatagggttagcgatttactaccctacagcacgtgttgtttatacagcatgttcacacgcagctgttgatgctttgtgtgaaaaagcttttaaatatttgaacattgctaaatgttcccgtatcattcctgcaaaggcacgtgttgagtgctatgacaggtttaaagttaatgagacaaattctcaatatttgtttagtactattaatgctctaccagaaacttctgccgatattctggtggttgatgaggttagtatgtgcactaattatgatctttcaattattaatgcacgtattaaagctaagcacattgtctatgtaggagatccagcacagttgccagctcctaggactttgttgactagaggcacattggaaccagaaaatttcaatagtgtcactagattgatgtgtaacttaggtcctgacatatttttaagtatgtgctacaggtgtcctaaggaaatagtaagcactgtgagcgctcttgtctacaataataaattgttagccaagaaggagctttcaggccagtgctttaaaatactctataagggcaatgtgacgcatgatgctagctctgccattaatagaccacaactcacatttgtgaagaattttattactgccaatccggcatggagtaaggcagtctttatttcgccttataattcacagaatgctgtggctcgttcaatgctgggtcttactactcagactgttgattcctcacagggttcagaataccagtatgttatcttctgtcaaacagcagatacggcacatgctaacaacattaacagatttaatgttgcaatcactcgtgcccaaaaaggtattctttgtgttatgacatctcaggcactctttgagtccttagagtttactgaattgtcttttactaattacaagctccagtctcagattgtaactggcctttttaaagattgctctagagaaacttctggcctctcacctgcttatgcaccaacatacgttagtgttgatgacaagtataagacgagtgatgagctttgcgtgaatcttaatttacccgcaaatatcccatactctcgtgttatttccaggatgggctttaaactcgatgcaacagttcctggatatcctaagcttttcattactcgtgaagaggctgtaaggcaagttcgaagctggataggcttcgatgttgagggtgctcatgcttcccgtaatgcatgtggcaccaatgtgcctctacaattaggattttcaactggtgtgaactttgttgttcagccagttggtgttgtagacactgagtggggtaacatgttaacgggcattgctgcccgtcctccaccaggtgaacagtttaagcacctcgtgcctcttatgcataagggggctgcgtggcctattgttagacgacgtatagtgcaaatgttgtcagacactttagacaaattgtctgattactgtacgtttgtttgttgggctcatggctttgaattaacgtctgcatcatacttttgcaagataggtaaggaacagaagtgttgcatgtgcaatagacgcgctgcagcgtactcttcacctctgcaatcttatgcctgctggactcattcctgcggttatgattatgtctacaaccctttctttgtcgatgttcaacagtggggttatgtaggcaatcttgctactaatcacgatcgttattgctctgtccatcaaggagctcatgtggcttctaatgatgcaataatgactcgttgtttagctattcattcttgttttatagaacgtgtggattgggatatagagtatccttatatctcacatgaaaagaaattgaattcctgttgtagaatcgttgagcgcaacgtcgtacgtgctgctcttcttgccggttcatttgacaaagtctatgatattggcaatcctaaaggaattcctattgttgatgaccctgtggttgattggcattattttgatgcacagcccttgaccagaaaggtacaacagcttttctatacagaggacatggcctcaagatttgctgatgggctctgcttattttggaactgtaatgtaccaaaatatcctaataatgcaattgtatgcaggtttgacacacgtgtgcattctgagttcaatttgccaggttgtgatggcggtagtttgtatgttaacaagcacgcttttcatacaccagcatatgatgtgagtgcattccgtgatctgaaacctttaccattcttttattattctactacaccatgtgaagtgcatggtaatggtagtatgatagaggatattgattatgtacccctaaaatctgcagtctgtattacagcttgtaatttagggggcgctgtttgtaggaagcatgctacagagtacagagagtatatggaagcatataatcttgtctctgcatcaggtttccgcctttggtgttataagacctttgatatttataatctctggtctacttttacaaaagttcaaggtttggaaaacattgcttttaatgttgttaaacaaggccattttattggtgttgagggtgaactacctgtagctgtagtcaatgataagatcttcaccaagagtggcgttaatgacatttgtatgtttgagaataaaaccactttgcctactaatatagcttttgaactctatgctaagcgtgctgtacgctcgcatcccgatttcaaattgctacacaatttacaagcagacatttgctacaagttcgtcctttgggattatgaacgtagcaatatttatggtactgctactattggtgtatgtaagtacactgatattgatgttaattcagctttgaatatatgttttgacatacgcgataatggttcattggagaagttcatgtctactcccaatgccatctttatttctgatagaaaaattaagaaatacccttgtattgtaggtcctgattatgcttacttcaatggtgctatcatccgtgatagtgatgttgttaaacaaccagtgaagttctacttgtataagaaagtcaataatgagtttattgatcctactgagtgtatttacactcagagtcgctcttgtagtgacttcctacccctgtctgacatggagaaagactttctatcttttgatagtgatgttttcattaagaagtatggcttggaaaactatgcttttgagcacgtagtctatggagacttctctcatactacgttaggcggtcttcacttgcttattggtttatacaagaagcaacaggaaggtcatattattatggaagaaatgctaaaaggtagctcaactattcataactattttattactgagactaacacagcggcttttaaggcggtgtgttctgttatagatttaaagcttgacgactttgttatgattttaaagagtcaagaccttggcgtagtatccaaggttgtcaaggtttctattgacttaacaatgattgagtttatgttatggtgtaaggatggacaggttcaaaccttctaccctcgactccaggcttctgcagattggaaacctggtcatgcaatgccatccctctttaaagttcaaaatgtaaaccttgaacgttgtgagcttgctaattacaagcaatctattcctatgcctcgcggtgtgcacatgaacatcgctaaatatatgcaattgtgccagtatttaaatacttgcacattagccgtgcctgccaatatgcgtgttatacattttggcgctggttctgataaaggtatcgctcctggtacatcagttttacgacagtggcttcctacagatgccattattatagataatgatttaaatgagttcgtgtcagatgctgacataactttatttggagattgtgtaactgtacgtgtcggccaacaagtggatcttgttatttccgacatgtatgatcctactactaagaatgtaacaggtagtaatgagtcaaaggctttattctttacttacctgtgtaacctcattaataataatcttgctcttggtgggtctgttgctattaaaataacagaacactcttggagcgttgaactttatgaacttatgggaaaatttgcttggtggactgttttctgcaccaatgcaaatgcatcctcatctgaaggattcctcttaggtattaattacttgggtactattaaagaaaatatagatggtggtgctatgcacgccaactatatattttggagaaattccactcctatgaatctgagtacttactcactttttgatttatccaagtttcaattaaaattaaaaggaacaccagttcttcaattaaaggagagtcaaattaacgaactcgtaatatctctcctgtcgcagggtaagttacttatccgtgacaatgatacactcagtgtttctactgatgttcttgttaacacctacagaaagttacgttgatgtagggccagattctgttaagtctgcttgtattgaggttgatatacaacagactttctttgataaaacttggcctaggccaattgatgtttctaaggctgacggtattatataccctcaaggccgtacatattctaacataactatcacttatcaaggtctttttccctatcagggagaccatggtgatatgtatgtctactctgcaggacatgctacaggcataactccacaaaagttgtttgtagctaactattctcaggacgtcaaacagtttgctaatgggtttgtcgtccgtataggagcagctgccaattccactggcactgttattattagcccatctaccagcgctactatacgaaaaatttaccctgcttttatgctgggttcttcagttggtaatttttcagatggtaaaatgggccgcttcttcaatcatactctagttcttttgcccgatggatgtggcactttacttagagctttttattgtattctagagcctcgctctggaaatcattgtcctgctggcaattcctatacttcttttgccacttatcacactcctgcaacagattgttctgatggcaattacaatcgtaatgccagtctgaactcttttaaggagtattttaatttacgtaactgcacctttatgtacacttataacattaccgaagatgagattttagagtggtttggcatcacacaaactgctcaaggtgttcacctcttctcatctcggtatgttgatttgtacggcggcaatatgtttcaatttgccaccttgcctgtttatgatactattaagtattattctatcattcctcacagtattcgttctatccaaagtgatagaaaagcttgggctgccttctacgtatataaacttcaaccgttaactttcctgttggatttttctgttgatggttatatacgcagagctatagactgtggttttaatgatttgtcacaactccactgctcatatgaatccttcgatgttgaatctggagtttattcagtttcgtctttcgaagcaaaaccttctggctcagttgtggaacaggctgaaggtgttgaatgtgatttttcacctcttctgtctggcacacctcctcaggtttataatttcaagcgtttggtttttaccaattgcaattataatcttaccaaattgctttcacttttttctgtgaatgattttacttgtagtcaaatatctccagcagcaattgctagcaactgttattcttcactgattttggattatttttcatacccacttagtatgaaatccgatctcagtgttagttctgctggtccaatatcccagtttaattataaacagtccttttctaatcccacatgtttgattttagcgactgttcctcataaccttactactattactaagcctcttaagtacagctatattaacaagtgctctcgtcttctttctggtgatcgtactgaagtacctcagttagtgaacgctaatcaatactcaccctgtgtatccattgtcccatccactgtgtgggaagacggtgattattataggaaacaactatctccacttgaaggtggtggctggcttgttgctagtggctcaactgttgccatgactgagcaattacagatgggctttggtattacagttcaatatggtacagacaccaatagtgtttgccccaagcttgaatttgctaatgacacaaaaattgcctctcaattaggcaattgcgtggaatattccctctatggtgtttcgggccgtggtgtttttcagaattgcacagctgtaggtgttcgacagcagcgctttgtttatgatgcgtaccagaatttagttggctattattctgatgatggcaactactactgtttgcgtgcttgtgttagtgttcctgtttctgtcatctatgataaagaaactaaaacccacgctactctatttggtagtgttgcatgtgaacacatttcctctaccatgtctcaatactcccgttctacgcgatcaatgcttaaacggcgagattctacatatggtccccttcagacacctgttggttgtgtcctaggacttgttaattcctctttgttcgtagaggactgcaagttgcctcttggtcaatctctctgtgctcttcctgacacacctagtactctcacacctcgcagtgtgcgctctgttccaggtgaaatgcgcttggcatccattgcttttaatcatcctattcaggttgatcaacttaatagtagttattttaaattaagtatacctactaatttttcctttggtgtgactcaggagtatattcagacaaccattcagaaagttactgttgattgtaaacagtacgtttgcaatggtttccagaagtgtgagcaattactgcgcgagtatggccagttttgttccaaaataaaccaggctctccatggtgccaatttacgccaggatgattctgtacgtaatttgtttgcgagcgtgaaaagctctcaatcatctcctatcataccaggttttggaggtgactttaatttgacacttctagaacctgtttctatatctactggcagtcgtagtgcacgtagtgctattgaggatttgctatttgacaaagtcactatagctgatcctggttatatgcaaggttacgatgattgtatgcagcaaggtccagcatcagctcgtgatcttatttgtgctcaatatgtggctggttataaagtattacctcctcttatggatgttaatatggaagccgcgtacacttcatctttgcttggcagcatagcaggtgttggctggactgctggcttatcctcctttgctgctattccatttgcacagagtattttttataggttaaacggtgttggcattactcaacaggttctttcagagaaccaaaagcttattgccaataagtttaatcaggctctgggagctatgcaaacaggcttcactacaactaatgaagcttttcggaaggttcaggatgctgtgaacaacaatgcacaggctctatccaaattagctagcgagctatctaatacttttggtgctatttccgcatctattggagacatcatacaacgtcttgatgttctcgaacaggacgcccaaatagacagacttattaatggccgtttgacaacactaaatgcttttgttgcacagcagcttgttcgttccgaatcagctgctctttccgctcaattggctaaagataaagtcaatgagtgtgtcaaggcacaatccaagcgttctggattttgcggtcaaggcacacatatagtgtcctttgttgtaaatgcccctaatggcctttactttatgcatgttggttattaccctagcaaccacattgaggttgcttctgcttatggtctttgcgatgcagctaaccctactaattgtatagcccctgttaatggctactttattaaaactaataacactagtattgttgatgagtggtcatatactggctcgtccttctatgcacctgagcccatcacctctcttaatactaagtatgttgcaccacaggtgacataccaaaacatttctactaacctccctcctcctcttctcggcaattccaccgggattgacttccaagatgagttggatgagtttttcaaaaatgttagcaccagtatacctaattttggttctctaacacagattaatactacattactcgatcttacctacgagatgttgtctcttcaacaagttgttaaagcccttaatgagtcttacatagaccttaaagagcttggcaattatacttattacaacaaatggccgtggtacatttggcttggtttcattgctgggcttgttgccttagctctatgcgtcttcttcatactgtgctgcactggttgtggcacaaactgtatgggaaaacttaagtgtaatcgttgttgtgatagatacgaggaatacgacctcgagccgcataaggttcatgttcactaattaacgaactatcaatgagagttcaaagaccacccactctcttgttagtgttctcactctcttttttggtcactgcattttcaaaacctctctatgtacctgagcattgtcagaattattctggttgcatgcttagggcttgtattaaaactgcccaagctgatacagctggtctttatacaaattttcgaattgacgtcccatctgcagaatcaactggtactcaatcagtttctgtcgatcgtgagtctacttcaactcatgatggtcttaccgaacatgttactagtgtgaatctttttgacgttggttactcagttaattaacgaactctatggattacgtgtctctgcttaatcaaatttggcagaagtaccttaattcaccgtatactacttgtttgtatatccctaaacccacagctaagtatacacctttagttggcacttcattgcaccctgtgctgtggaactgtcagctatcctttgctggttatactgaatctgctgttaattctacaaaagctttggccaaacaggacgcagctcagcgaatcgcttggttgctacataaggatggaggaatccctgacggatgttccctctacctccggcactcaagtttattcgcgcaaagcgaggaagaggagtcattctccaactaagaaactgcgctacgttaagcgtagattttctcttctgcgccctgaagaccttagtgttattgtccaaccaacacactatgtcagggttacattttcagaccccaacatgtggtatctacgttcgggtcatcatttacactcagttcacaattggcttaaaccttatggcggccaacctgtttctgagtaccatattactctagctttgctaaatctcactgatgaagatttagctagagatttttcacccattgcgctctttttgcgcaatgtcagatttgagctacatgagttcgccttgctgcgcaaaactcttgttcttaatgcatcagagatctactgtgctaacatacatagatttaagcctgtgtatagagttaacacggcaatccctactattaaggattggcttctcgttcagggattttccctttaccatagtggcctccctttacatatgtcaatctctaaattgcatgcactggatgatgttactcgcaattacatcattacaatgccatgctttagaacttatcctcaacaaatgtttgttactcctttggccgtagatgttgtctccatacggtcttccaatcagggtaataaacaaattgttcattcttaccccattttacatcatccaggattttaacgaactatggctttctcggcgtctttatttaaacccgtccagctagtcccagtttcccctgcatttcatcgcattgagtctactgactctattgttttcacatacattcctgctagcggctatgtagctgctttagctgtcaatgtgtgtctcattcccctattattactgctacgtcaagatacttgtcgtcgcagcattatcagaactatggttctctatttccttgttctttataactttttattagccattgtactagtcaatggtgtacattatccaactggaagttgcctgatagccttcttagttatcctcataatactttggtttgtagatagaattcgtttctgtctcatgctgaattcctacattccactgtttgacatgcgttctcactttattcgtgttagtacagtttcttctcatggtatggtccctgtcatacacaccaaaccattatttattagaaacttcgatcagcgttgcagctgttctcgttgtttttatttgcactcttctacttatatagagtgcacttatattagccgttttagtaagattagcctagtttctgtaactgacttctccttaaacggcaatgtttccactgttttcgtgcctgcaacgcgcgattcagttcctcttcacataatcgccccgagctcgcttatcgtttaagcagctctgcgctactatgggtcccgtgtagaggctaatccattagtctctctttggacatatggaaaacgaactatgttaccctttgtccaagaacgaatagggttgttcatagtaaactttttcatttttaccgtagtatgtgctataacactcttggtgtgtatggctttccttacggctactagattatgtgtgcaatgtatgacaggcttcaataccctgttagttcagcccgcattatacttgtataatactggacgttcagtctatgtaaaattccaggatagtaaaccccctctaccacctgacgagtggttttaacgaactccttcataatgtctaatatgacgcaactcactgaggcgcagattattgccattattaaagactggaactttgcatggtccctgatctttctcttaattactatcgtactacagtatggatacccatcccgtagtatgactgtctatgtctttaaaatgtttgttttatggctcctatggccatcttccatggcgctatcaatatttagcgccatttatccaattgatctagcttcccagataatctctggcattgtatcagctgtttcagctatgatgtggatttcctactttgtgcagagtatccggctgtttatgagaactggatcatggtggtcattcaatcctgagactaattgccttttgaacgttccaattggtggtacaactgtcgtacgtccactcgtagaggactctaccagtgtaactgctgttgtaaccaatggtcacctcaaaatggctggcatgcatttcggtgcttgtgactacgacagacttcctaatgaagtcaccgtggccaaacccaatgtgctgattgctttaaaaatggtgaagcggcaaagctacggaactaattccggcgttgccatttaccatagatataaggcaggtaattacaggagtccgcctattacggcggatattgaacttgcattgcttcgagcttaggctctttagtaagagtatcttaattgattttaacgaatctcaatttcattgttatggcatcccctgctgcacctcgtgctgtttcctttgccgataacaatgatataacaaatacaaacatgtctcgaggtagaggacgtaatccaaaaccacgagctgcaccaaataacactgtctcttggtacactgggcttacccaacacgggaaagtccctcttacctttccacctgggcagggtgtacctcttaatgccaattccacccctgcgcaaaatgctgggtattggcggagacaggacagaaaaattaataccgggaatggaattaagcaactggctcccaggtggtacttctactacactggaactggacccgaagcagcactcccattccgggctgttaaggatggcatcgtttgggtccatgaagatggcgccactgatgctccttcaacttttgggacgcggaaccctaacaatgattcagctattgttacacaattcgcgcccggtactaagcttcctaaaaacttccacattgaggggactggaggcaatagtcaatcatcttcaagagcctctagcgtaagcagaaactcttccagatctagttcacaaggttcaagatcaggaaactctacccgcggcacttctccaggtccatctggaatcggagcagtaggaggtgatctactttaccttgatcttctgaacagactacaagcccttgagtctggcaaagtaaagcaatcgcagccaaaagtaatcactaagaaagatgctgctgctgctaaaaataagatgcgccacaagcgcacttccaccaaaagtttcaacatggtgcaagcttttggtcttcgcggaccaggagacctccagggaaactttggtgatcttcaattgaataaactcggcactgaggacccacgttggccccaaattgctgagcttgctcctacagccagtgcttttatgggtatgtcgcaatttaaacttacccatcagaacaatgatgatcatggcaaccctgtgtacttccttcggtacagtggagccattaaacttgacccaaagaatcccaactacaataagtggttggagcttcttgagcaaaatattgatgcctacaaaaccttccctaagaaggaaaagaaacaaaaggcaccaaaagaagaatcaacagaccaaatgtctgaacctccaaaggagcagcgtgtgcaaggtagcatcactcagcgcactcgcacccgtccaagtgttcagcctggtccaatgattgatgttaacactgattagtgtcactcaaagtaacaagatcgcggcaatcgtttgtgtttggtaaccccatctcaccatcgcttgtccactcttgcacagaatggaatcatgttgtaattacagtgcaataaggtaattataacccatttaattgatagctatgctttattaaagtgtgtagctgtagagagaatgttaaagactgtcacctctgcgtgattgcaagtgaacagtgccccccgggaagagctctacagtgtgaaatgtaaataaaaatagctattattcaattagattaggctaattagatgatttgcaaaaaaaaaaaa

SEQ ID NO: 5 - DNA, 29844 bp, Artificial Sequence
  SARS-CoV2 WA-UW322/2020
cctttaaactttcgatctcttgtagatctgttctctaaacgaactttaaaatctgtgtggctgtcactcggctgcatgcttagtgcactcacgcagtataattaataactaattactgtcgttgacaggacacgagtaactcgtctatcttctgcaggctgcttacggtttcgtccgtgttgcagccgatcatcagcacatctaggttttgtccgggtgtgaccgaaaggtaagatggagagccttgtccctggtttcaacgagaaaacacacgtccaactcagtttgcctgttttacaggttcgcgacgtgctcgtacgtggctttggagactccgtggaggaggtcttatcagaggcacgtcaacatcttaaagatggcacttgtggcttagtagaagttgaaaaaggcgttttgcctcaacttgaacagccctatgtgttcatcaaacgttcggatgctcgaactgcacctcatggtcatgttatggttgagctggtagcagaactcgaaggcattcagtacggtcgtagtggtgagacacttggtgtccttgtccctcatgtgggcgaaataccagtggcttaccgcaaggttcttcttcgtaagaacggtaataaaggagctggtggccatagttacggcgccgatctaaagtcatttgacttaggcgacgagcttggcactgatccttatgaagattttcaagaaaactggaacactaaacatagcagtggtgttacccgtgaactcatgcgtgagcttaacggaggggcatacactcgctatgtcgataacaacttctgtggccctgatggctaccctcttgagtgcattaaagaccttctagcacgtgctggtaaagcttcatgcactttgtccgaacaactggactttattgacactaagaggggtgtatactgctgccgtgaacatgagcatgaaattgcttggtacacggaacgttctgaaaagagctatgaattgcagacaccttttgaaattaaattggcaaagaaatttgacaccttcaatggggaatgtccaaattttgtatttcccttaaattccataatcaagactattcaaccaagggttgaaaagaaaaagcttgatggctttatgggtagaattcgatctgtctatccagttgcgtcaccaaatgaatgcaaccaaatgtgcctttcaactctcatgaagtgtgatcattgtggtgaaacttcatggcagacgggcgattttgttaaagccacttgcgaattttgtggcactgagaatttgactaaagaaggtgccactacttgtggttacttaccccaaaatgctgttgttaaaatttattgtccagcatgtcacaattcagaagtaggacctgagcatagtcttgccgaataccataatgaatctggcttgaaaaccattcttcgtaagggtggtcgcactattgcctttggaggctgtgtgttctcttatgttggttgccataacaagtgtgcctattgggttccacgtgctagcgctaacataggttgtaaccatacaggtgttgttggagaaggttccgaaggtcttaatgacaaccttcttgaaatactccaaaaagagaaagtcaacatcaatattgttggtgactttaaacttaatgaagagatcgccattattttggcatctttttctgcttccacaagtgcttttgtggaaactgtgaaaggtttggattataaagcattcaaacaaattgttgaatcctgtggtaattttaaagttacaaaaggaaaagctaaaaaaggtgcctggaatattggtgaacagaaatcaatactgagtcctctttatgcatttgcatcagaggctgctcgtgttgtacgatcaattttctcccgcactcttgaaactgctcaaaattctgtgcgtgttttacagaaggccgctataacaatactagatggaatttcacagtattcactgagactcattgatgctatgatgttcacatctgatttggctactaacaatctagttgtaatggcctacattacaggtggtgttgttcagttgacttcgcagtggctaactaacatctttggcactgtttatgaaaaactcaaacccgtccttgattggcttgaagagaagtttaaggaaggtgtagagtttcttagagacggttgggaaattgttaaatttatctcaacctgtgcttgtgaaattgtcggtggacaaattgtcacctgtgcaaaggaaattaaggagagtgttcagacattctttaagcttgtaaataaatttttggctttgtgtgctgactctatcattattggtggagctaaacttaaagccttgaatttaggtgaaacatttgtcacgcactcaaagggattgtacagaaagtgtgttaaatccagagaagaaactggcctactcatgcctctaaaagccccaaaagaaattatcttcttagagggagaaacacttcccacagaagtgttaacagaggaagttgtcttgaaaactggtgatttacaaccattagaacaacctactagtgaagctgttgaagctccattggttggtacaccagtttgtattaacgggcttatgttgctcgaaatcaaagacacagaaaagtactgtgcccttgcacctaatatgatggtaacaaacaataccttcacactcaaaggcggtgcaccaacaaaggttacttttggtgatgacactgtgatagaagtgcaaggttacaagagtgtgaatatcacttttgaacttgatgaaaggattgataaagtacttaatgagaagtgctctgcctatacagttgaactcggtacagaagtaaatgagttcgcctgtgttgtggcagatgctgtcataaaaactttgcaaccagtatctgaattacttacaccactgggcattgatttagatgagtggagtatggctacatactacttatttgatgagtctggtgagtttaaattggcttcacatatgtattgttctttttaccctccagatgaggatgaagaagaaggtgattgtgaagaagaagagtttgagccatcaactcaatatgagtatggtactgaagatgattaccaaggtaaacctttggaatttggtgccacttctgctgctcttcaacctgaagaagagcaagaagaagattggttagatgatgatagtcaacaaactgttggtcaacaagacggcagtgaggacaatcagacaactactattcaaacaattgttgaggttcaacctcaattagagatggaacttacaccagttgttcagactattgaagtgaatagttttagtggttatttaaaacttactgacaatgtatacattaaaaatgcagacattgtggaagaagctaaaaaggtaaaaccaacagtggttgttaatgcagccaatgtttaccttaaacatggaggaggtgttgcaggagccttaaataaggctactaacaatgccatgcaagttgaatctgatgattacatagctactaatggaccacttaaagtgggtggtagttgtgttttaagcggacacaatcttgctaaacactgtcttcatgttgtcggcccaaatgttaacaaaggtgaagacattcaacttcttaagagtgcttatgaaaattttaatcagcacgaagttctacttgcaccattattatcagctggtatttttggtgctgaccctatacattctttaagagtttgtgtagatactgttcgcacaaatgtctacttagctgtctttgataaaaatctctatgacaaacttgtttcaagctttttggaaatgaagagtgaaaagcaagttgaacaaaagatcgctgagattcctaaagaggaagttaagccatttataactgaaagtaaaccttcagttgaacagagaaaacaagatgataagaaaatcaaagcttgtgttgaagaagttacaacaactctggaagaaactaagttcctcacagaaaacttgttactttatattgacattaatggcaatcttcatccagattctgccactcttgttagtgacattgacatcactttcttaaagaaagatgctccatatatagtgggtgatgttgttcaagagggtgttttaactgctgtggttatacctactaaaaaggctggtggcactactgaaatgctagcgaaagctttgagaaaagtgccaacagacaattatataaccacttacccgggtcagggtttaaatggttacactgtagaggaggcaaagacagtgcttaaaaagtgtaaaagtgccttttacattctaccatctattatctctaatgagaagcaagaaattcttggaactgtttcttggaatttgcgagaaatgcttgcacatgcagaagaaacacgcaaattaatgcctgtctgtgtggaaactaaagccatagtttcaactatacagcgtaaatataagggtattaaaatacaagagggtgtggttgattatggtgctagattttacttttacaccagtaaaacaactgtagcgtcacttatcaacacacttaacgatctaaatgaaactcttgttacaatgccacttggctatgtaacacatggcttaaatttggaagaagctgctcggtatatgagatctctcaaagtgccagctacagtttctgtttcttcacctgatgctgttacagcgtataatggttatcttacttcttcttctaaaacacctgaagaacattttattgaaaccatctcacttgctggttcctataaagattggtcctattctggacaatctacacaactaggtatagaatttcttaagagaggtgataaaagtgtatattacactagtaatcctaccacattccacctagatggtgaagttatcacctttgacaatcttaagacacttctttctttgagagaagtgaggactattaaggtgtttacaacagtagacaacattaacctccacacgcaagttgtggacatgtcaatgacatatggacaacagtttggtccaacttatttggatggagctgatgttactaaaataaaacctcataattcacatgaaggtaaaacattttatgttttacctaatgatgacactctacgtgttgaggcttttgagtactaccacacaactgatcctagttttctgggtaggtacatgtcagcattaaatcacactaaaaagtggaaatacccacaagttaatggtttaacttctattaaatgggcagataacaactgttatcttgccactgcattgttaacactccaacaaatagagttgaagtttaatccacctgctctacaagatgcttattacagagcaagggctggtgaagctgctaacttttgtgcacttatcttagcctactgtaataagacagtaggtgagttaggtgatgttagagaaacaatgagttacttgtttcaacatgccaatttagattcttgcaaaagagtcttgaacgtggtgtgtaaaacttgtggacaacagcagacaacccttaagggtgtagaagctgttatgtacatgggcacactttcttatgaacaatttaagaaaggtgttcagataccttgtacgtgtggtaaacaagctacaaaatatctagtacaacaggagtcaccttttgttatgatgtcagcaccacctgctcagtatgaacttaagcatggtacatttacttgtgctagtgagtacactggtaattaccagtgtggtcactataaacatataacttctaaagaaactttgtattgcatagacggtgctttacttacaaagtcctcagaatacaaaggtcctattacggatgttttctacaaagaaaacagttacacaacaaccataaaaccagttacttataaattggatggtgttgtttgtacagaaattgaccctaagttggacaattattataagaaagacaattcttatttcacagagcaaccaattgatcttgtaccaaaccaaccatatccaaacgcaagcttcgataattttaagtttgtatgtgataatatcaaatttgctgatgatttaaaccagttaactggttataagaaacctgcttcaagagagcttaaagttacatttttccctgacttaaatggtgatgtggtggctattgattataaacactacacaccctcttttaagaaaggagctaaattgttacataaacctattgtttggcatgttaacaatgcaactaataaagccacgtataaaccaaatacctggtgtatacgttgtctttggagcacaaaaccagttgaaacatcaaattcgtttgatgtactgaagtcagaggacgcgcagggaatggataatcttgcctgcgaagatctaaaaccagtctctgaagaagtagtggaaaatcctaccatacagaaagacgttcttgagtgtaatgtgaaaactaccgaagttgtaggagacattatacttaaaccagcaaataatagtttaaaaattacagaagaggttggccacacagatctaatggctgcttatgtagacaattctagtcttactattaagaaacctaatgaattatctagagtattaggtttgaaaacccttgctactcatggtttagctgctgttaatagtgtcccttgggatactatagctaattatgctaagccttttcttaacaaagttgttagtacaactactaacatagttacacggtgtttaaaccgtgtttgtactaattatatgccttatttctttactttattgctacaattgtgtacttttactagaagtacaaattctagaattaaagcatctatgccgactactatagcaaagaatactgttaagagtgtcggtaaattttgtctagaggcttcatttaattatttgaagtcacctaatttttctaaactgataaatattataatttggtttttactattaagtgtttgcctaggttctttaatctactcaaccgctgctttaggtgttttaatgtctaatttaggcatgccttcttactgtactggttacagagaaggctatttgaactctactaatgtcactattgcaacctactgtactggttctataccttgtagtgtttgtcttagtggtttagattctttagacacctatccttctttagaaactatacaaattaccatttcatcttttaaatgggatttaactgcttttggcttagttgcagagtggtttttggcatatattcttttcactaggtttttctatgtacttggattggctgcaatcatgcaattgtttttcagctattttgcagtacattttattagtaattcttggcttatgtggttaataattaatcttgtacaaatggccccgatttcagctatggttagaatgtacatcttctttgcatcattttattatgtatggaaaagttatgtgcatgttgtagacggttgtaattcatcaacttgtatgatgtgttacaaacgtaatagagcaacaagagtcgaatgtacaactattgttaatggtgttagaaggtccttttatgtctatgctaatggaggtaaaggcttttgcaaactacacaattggaattgtgttaattgtgatacattctgtgctggtagtacatttattagtgatgaagttgcgagagacttgtcactacagtttaaaagaccaataaatcctactgaccagtcttcttacatcgttgatagtgttacagtgaagaatggttccatccatctttactttgataaagctggtcaaaagacttatgaaagacattctctctctcattttgttaacttagacaacctgagagctaataacactaaaggttcattgcctattaatgttatagtttttgatggtaaatcaaaatgtgaagaatcatctgcaaaatcagcgtctgtttactacagtcagcttatgtgtcaacctatactgttactagatcaggcattagtgtctgatgttggtgatagtgcggaagttgcagttaaaatgtttgatgcttacgttaatacgttttcatcaacttttaacgtaccaatggaaaaactcaaaacactagttgcaactgcagaagctgaacttgcaaagaatgtgtccttagacaatgtcttatctacttttatttcagcagctcggcaagggtttgttgattcagatgtagaaactaaagatgttgttgaatgtcttaaattgtcacatcaatctgacatagaagttactggcgatagttgtaataactatatgctcacctataacaaagttgaaaacatgacaccccgtgaccttggtgcttgtattgactgtagtgcgcgtcatattaatgcgcaggtagcaaaaagtcacaacattgctttgatatggaacgttaaagatttcatgtcattgtctgaacaactacgaaaacaaatacgtagtgctgctaaaaagaataacttaccttttaagttgacatgtgcaactactagacaagttgttaatgttgtaacaacaaagatagcacttaagggtggtaaaattgttaataattggttgaagcagttaattaaagttacacttgtgttcctttttgttgctgctattttctatttaataacacctgttcatgtcatgtctaaacatactgacttttcaagtgaaatcataggatacaaggctattgatggtggtgtcactcgtgacatagcatctacagatacttgttttgctaacaaacatgctgattttgacacatggtttagccagcgtggtggtagttatactaatgacaaagcttgcccattgattgctgcagtcataacaagagaagtgggttttgtcgtgcctggtttgcctggcacgatattacgcacaactaatggtgactttttgcatttcttacctagagtttttagtgcagttggtaacatctgttacacaccatcaaaacttatagagtacactgactttgcaacatcagcttgtgttttggctgctgaatgtacaatttttaaagatgcttctggtaagccagtaccatattgttatgataccaatgtactagaaggttctgttgcttatgaaagtttacgccctgacacacgttatgtgctcatggatggctctattattcaatttcctaacacctaccttgaaggttctgttagagtggtaacaacttttgattctgagtactgtaggcacggcacttgtgaaagatcagaagctggtgtttgtgtatctactagtggtagatgggtacttaacaatgattattacagatctttaccaggagttttctgtggtgtagatgctgtaaatttacttactaatatgtttacaccactaattcaacctattggtgctttggacatatcagcatctatagtagctggtggtattgtagctatcgtagtaacatgccttgcctactattttatgaggtttagaagagcttttggtgaatacagtcatgtagttgcctttaatactttactattccttatgtcattcactgtactctgtttaacaccagtttactcattcttacctggtgtttattctgttatttacttgtacttgacattttatcttactaatgatgtttcttttttagcacatattcagtggatggttatgttcacacctttagtacctttctggataacaattgcttatatcatttgtatttccacaaagcatttctattggttctttagtaattacctaaagagacgtgtagtctttaatggtgtttcctttagtacttttgaagaagctgcgctgtgcacctttttgttaaataaagaaatgtatctaaagttgcgtagtgatgtgctattacctcttacgcaatataatagatacttagctctttataataagtacaagtattttagtggagcaatggatacaactagctacagagaagctgcttgttgtcatctcgcaaaggctctcaatgacttcagtaactcaggttctgatgttctttaccaaccaccacaaacctctatcacctcagctgttttgcagagtggttttagaaaaatggcattcccatctggtaaagttgagggttgtatggtacaagtaacttgtggtacaactacacttaacggtctttggcttgatgacgtagtttactgtccaagacatgtgatctgcacctctgaagacatgcttaaccctaattatgaagatttactcattcgtaagtctaatcataatttcttggtacaggctggtaatgttcaactcagggttattggacattctatgcaaaattgtgtacttaagcttaaggttgatacagccaatcctaagacacctaagtataagtttgttcgcattcaaccaggacagactttttcagtgttagcttgttacaatggttcaccatctggtgtttaccaatgtgctatgaggcccaatttcactattaagggttcattccttaatggttcatgtggtagtgttggttttaacatagattatgactgtgtctctttttgttacatgcaccatatggaattaccaactggagttcatgctggcacagacttagaaggtaacttttatggaccttttgttgacaggcaaacagcacaagcagctggtacggacacaactattacagttaatgttttagcttggttgtacgctgctgttataaatggagacaggtggtttctcaatcgatttaccacaactcttaatgactttaaccttgtggctatgaagtacaattatgaacctctaacacaagaccatgttgacatactaggacctctttctgctcaaactggaattgccgttttagatatgtgtgcttcattaaaagaattactgcaaaatggtatgaatggacgtaccatattgggtagtgctttattagaagatgaatttacaccttttgatgttgttagacaatgctcaggtgttactttccaaagtgcagtgaaaagaacaatcaagggtacacaccactggttgttactcacaattttgacttcacttttagttttagtccagagtactcaatggtctttgttcttttttttgtatgaaaatgcctttttaccttttgctatgggtattattgctatgtctgcttttgcaatgatgtttgtcaaacataagcatgcatttctctgtttgtttttgttaccttctcttgccactgtagcttattttaatatggtctatatgcctgctagttgggtgatgcgtattatgacatggttggatatggttgatactagtttgtctggttttaagctaaaagactgtgttatgtatgcatcagctgtagtgttactaatccttatgacagcaagaactgtgtatgatgatggtgctaggagagtgtggacacttatgaatgtcttgacactcgtttataaagtttattatggtaatgctttagatcaagccatttccatgtgggctcttataatctctgttacttctaactactcaggtgtagttacaactgtcatgtttttggccagaggtattgtttttatgtgtgttgagtattgccctattttcttcataactggtaatacacttcagtgtataatgctagtttattgtttcttaggctatttttgtacttgttactttggcctcttttgtttactcaaccgctactttagactgactcttggtgtttatgattacttagtttctacacaggagtttagatatatgaattcacagggactactcccacccaagaatagcatagatgccttcaaactcaacattaaattgttgggtgttggtggcaaaccttgtatcaaagtagccactgtacagtctaaaatgtcagatgtaaagtgcacatcagtagtcttactctcagttttgcaacaactcagagtagaatcatcatctaaattgtgggctcaatgtgtccagttacacaatgacattctcttagctaaagatactactgaagcctttgaaaaaatggtttcactactttctgttttgctttccatgcagggtgctgtagacataaacaagctttgtgaagaaatgctggacaacagggcaaccttacaagctatagcctcagagtttagttcccttccatcatatgcagcttttgctactgctcaagaagcttatgagcaggctgttgctaatggtgattctgaagttgttcttaaaaagttgaagaagtctttgaatgtggctaaatctgaatttgaccgtgatgcagccatgcaacgtaagttggaaaagatggctgatcaagctatgacccaaatgtataaacaggctagatctgaggacaagagggcaaaagttactagtgctatgcagacaatgcttttcactatgcttagaaagttggataatgatgcactcaacaacattatcaacaatgcaagagatggttgtgttcccttgaacataatacctcttacaacagcagccaaactaatggttgtcataccagactataacacatataaaaatacgtgtgatggtacaacatttacttatgcatcagcattgtgggaaatccaacaggttgtagatgcagatagtaaaattgttcaacttagtgaaattagtatggacaattcacctaatttagcatggcctcttattgtaacagctttaagggccaattctgctgtcaaattacagaataatgagcttagtcctgttgcactacgacagatgtcttgtgctgccggtactacacaaactgcttgcactgatgacaatgcgttagcttactacaacacaacaaagggaggtaggtttgtacttgcactgttatccgatttacaggatttgaaatgggctagattccctaagagtgatggaactggtactatctatacagaactggaaccaccttgtaggtttgttacagacacacctaaaggtcctaaagtgaagtatttatactttattaaaggattaaacaacctaaatagaggtatggtacttggtagtttagctgccacagtacgtctacaagctggtaatgcaacagaagtgcctgccaattcaactgtattatctttctgtgcttttgctgtagatgctgctaaagcttacaaagattatctagctagtgggggacaaccaatcactaattgtgttaagatgttgtgtacacacactggtactggtcaggcaataacagttacaccggaagccaatatggatcaagaatcctttggtggtgcatcgtgttgtctgtactgccgttgccacatagatcatccaaatcctaaaggattttgtgacttaaaaggtaagtatgtacaaatacctacaacttgtgctaatgaccctgtgggttttacacttaaaaacacagtctgtaccgtctgcggtatgtggaaaggttatggctgtagttgtgatcaactccgcgaacccatgcttcagtcagctgatgcacaatcgtttttaaacgggtttgcggtgtaagtgcagcccgtcttacaccgtgcggcacaggcactagtactgatgtcgtatacagggcttttgacatctacaatgataaagtagctggttttgctaaattcctaaaaactaattgttgtcgcttccaagaaaaggacgaagatgacaatttaattgattcttactttgtagttaagagacacactttctctaactaccaacatgaagaaacaatttataatttacttaaggattgtccagctgttgctaaacatgacttctttaagtttagaatagacggtgacatggtaccacatatatcacgtcaacgtcttactaaatacacaatggcagacctcgtctatgctttaaggcattttgatgaaggtaattgtgacacattaaaagaaatacttgtcacatacaattgttgtgatgatgattatttcaataaaaaggactggtatgattttgtagaaaacccagatatattacgcgtatacgccaacttaggtgaacgtgtacgccaagctttgttaaaaacagtacaattctgtgatgccatgcgaaatgctggtattgttggtgtactgacattagataatcaagatctcaatggtaactggtatgatttcggtgatttcatacaaaccacgccaggtagtggagttcctgttgtagattcttattattcattgttaatgcctatattaaccttgaccagggctttaactgcagagtcacatgttgacactgacttaacaaagccttacattaagtgggatttgttaaaatatgacttcacggaagagaggttaaaactctttgaccgttattttaaatattgggatcagacataccacccaaattgtgttaactgtttggatgacagatgcattctgcattgtgcaaactttaatgttttattctctacagtgttcccacttacaagttttggaccactagtgagaaaaatatttgttgatggtgttccatttgtagtttcaactggataccacttcagagagctaggtgttgtacataatcaggatgtaaacttacatagctctagacttagttttaaggaattacttgtgtatgctgctgaccctgctatgcacgctgcttctggtaatctattactagataaacgcactacgtgcttttcagtagctgcacttactaacaatgttgcttttcaaactgtcaaacccggtaattttaacaaagacttctatgactttgctgtgtctaagggtttctttaaggaaggaagttctgttgaattaaaacacttcttctttgctcaggatggtaatgctgctatcagcgattatgactactatcgttataatctaccaacaatgtgtgatatcagacaactactatttgtagttgaagttgttgataagtactttgattgttacgatggtggctgtattaatgctaaccaagtcatcgtcaacaacctagacaaatcagctggttttccatttaataaatggggtaaggctagactttattatgattcaatgagttatgaggatcaagatgcacttttcgcatatacaaaacgtaatgtcatccctactataactcaaatgaatcttaagtatgccattagtgcaaagaatagagctcgcaccgtagctggtgtctctatctgtagtactatgaccaatagacagtttcatcaaaaattattgaaatcaatagccgccactagaggagctactgtagtaattggaacaagcaaattctatggtggttggcacaacatgttaaaaactgtttatagtgatgtagaaaaccctcaccttatgggttgggattatcctaaatgtgatagagccatgcctaacatgcttagaattatggcctcacttgttcttgctcgcaaacatacaacgtgttgtagcttgtcacaccgtttctatagattagctaatgagtgtgctcaagtattgagtgaaatggtcatgtgtggcggttcactatatgttaaaccaggtggaacctcatcaggagatgccacaactgcttatgctaatagtgtttttaacatttgtcaagctgtcacggccaatgttaatgcacttttatctactgatggtaacaaaattgccgataagtatgtccgcaatttacaacacagactttatgagtgtctctatagaaatagagatgttgacacagactttgtgaatgagttttacgcatatttgcgtaaacatttctcaatgatgatactctctgacgatgctgttgtgtgtttcaatagcacttatgcatctcaaggtctagtggctagcataaagaactttaagtcagttctttattatcaaaacaatgtttttatgtctgaagcaaaatgttggactgagactgaccttactaaaggacctcatgaattttgctctcaacatacaatgctagttaaacagggtgatgattatgtgtaccttccttacccagatccatcaagaatcctaggggccggctgttttgtagatgatatcgtaaaaacagatggtacacttatgattgaacggttcgtgtctttagctatagatgcttacccacttactaaacatcctaatcaggagtatgctgatgtctttcatttgtacttacaatacataagaaagctacatgatgagttaacaggacacatgttagacatgtattctgttatgcttactaatgataacacttcaaggtattgggaacctgagttttatgaggctatgtacacaccgcatacagtcttacaggctgttggggcttgtgttctttgcaattcacagacttcattaagatgtggtgcttgcatacgtagaccattcttatgttgtaaatgctgttacgaccatgtcatatcaacatcacataaattagtcttgtctgttaatccgtatgtttgcaatgctccaggttgtgatgtcacagatgtgactcaactttacttaggaggtatgagctattattgtaaatcacataaaccacccattagttttccattgtgtgctaatggacaagtttttggtttatataaaaatacatgtgttggtagcgataatgttactgactttaatgcaattgcaacatgtgactggacaaatgctggtgattacattttagctaacacctgtactgaaagactcaagctttttgcagcagaaacgctcaaagctactgaggagacatttaaactgtcttatggtattgctactgtacgtgaagtgctgtctgacagagaattacatctttcatgggaagttggtaaacctagaccaccacttaaccgaaattatgtctttactggttatcgtgtaactaaaaacagtaaagtacaaataggagagtacacctttgaaaaaggtgactatggtgatgctgttgtttaccgaggtacaacaacttacaaattaaatgttggtgattattttgtgctgacatcacatacagtaatgccattaagtgcacctacactagtgccacaagagcactatgttagaattactggcttatacccaacactcaatatctcagatgagttttctagcaatgttgcaaattatcaaaaggttggtatgcaaaagtattctacactccagggaccacctggtactggtaagagtcattttgctattggcctagctctctactacccttctgctcgcatagtgtatacagcttgctctcatgccgctgttgatgcactatgtgagaaggcattaaaatatttgcctatagataaatgtagtagaattatacctgcacgtgctcgtgtagagtgttttgataaattcaaagtgaattcaacattagaacagtatgtcttttgtactgtaaatgcattgcctgagacgacagcagatatagttgtctttgatgaaatttcaatggccacaaattatgatttgagtgttgtcaatgccagattacgtgctaagcactatgtgtacattggcgaccctgctcaattacctgcaccacgcacattgctaactaagggcacactagaaccagaatatttcaattcagtgtgtagacttatgaaaactataggtccagacatgttcctcggaacttgtcggcgttgtcctgctgaaattgttgacactgtgagtgctttggtttatgataataagcttaaagcacataaagacaaatcagctcaatgctttaaaatgttttataagggtgttatcacgcatgatgtttcatctgcaattaacaggccacaaataggcgtggtaagagaattccttacacgtaaccctgcttggagaaaagctgtctttatttcaccttataattcacagaatgctgtagcctcaaagattttgggactaccaactcaaactgttgattcatcacagggctcagaatatgactatgtcatattcactcaaaccactgaaacagctcactcttgtaatgtaaacagatttaatgttgctattaccagagcaaaagtaggcatactttgcataatgtctgatagagacctttatgacaagttgcaatttacaagtcttgaaattccacgtaggaatgtggcaactttacaagctgaaaatgtaacaggactctttaaagattgtagtaaggtaatcactgggttacatcctacacaggcacctacacacctcagtgttgacactaaattcaaaactgaaggtttatgtgttgacatacctggcatacctaaggacatgacctatagaagactcatctctatgatgggttttaaaatgaattatcaagttaatggttaccctaacatgtttatcacccgcgaagaagctataagacatgtacgtgcatggattggcttcgatgtcgaggggtgtcatgctactagagaagctgttggtaccaatttacctttacagctaggtttttctacaggtgttaacctagttgctgtacctacaggttatgttgatacacctaataatacagatttttccagagttagtgctaaaccaccgcctggagatcaatttaaacacctcataccacttatgtacaaaggacttccttggaatgtagtgcgtataaagattgtacaaatgttaagtgacacacttaaaaatctctctgacagagtcgtatttgtcttatgggcacatggctttgagttgacatctatgaagtattttgtgaaaataggacctgagcgcacctgttgtctatgtgatagacgtgccacatgcttttccactgcttcagacacttatgcctgttggcatcattctattggatttgattacgtctataatccgtttatgattgatgttcaacaatggggttttacaggtaacctacaaagcaaccatgatctgtattgtcaagtccatggtaatgcacatgtagctagttgtgatgcaatcatgactaggtgtctagctgtccacgagtgctttgttaagcgtgttgactggactattgaatatcctataattggtgatgaactgaagattaatgcggcttgtagaaaggttcaacacatggttgttaaagctgcattattagcagacaaattcccagttcttcacgacattggtaaccctaaagctattaagtgtgtacctcaagctgatgtagaatggaagttctatgatgcacagccttgtagtgacaaagcttataaaatagaagaattattctattcttatgccacacattctgacaaattcacagatggtgtatgcctattttggaattgcaatgtcgatagatatcctgctaattccattgtttgtagatttgacactagagtgctatctaaccttaacttgcctggttgtgatggtggcagtttgtatgtaaataaacatgcattccacacaccagcttttgataaaagtgcttttgttaatttaaaacaattaccatttttctattactctgacagtccatgtgagtctcatggaaaacaagtagtgtcagatatagattatgtaccactaaagtctgctacgtgtataacacgttgcaatttaggtggtgctgtctgtagacatcatgctaatgagtacagattgtatctcgatgcttataacatgatgatctcagctggctttagcttgtgggtttacaaacaatttgatacttataacctctggaacacttttacaagacttcagagtttagaaaatgtggcttttaatgttgtaaataagggacactttgatggacaacagggtgaagtaccagtttctatcattaataacactgtttacacaaaagttgatggtgttgatgtagaattgtttgaaaataaaacaacattacctgttaatgtagcatttgagctttgggctaagcgcaacattaaaccagtaccagaggtgaaaatactcaataatttgggtgtggacattgctgctaatactgtgatctgggactacaaaagagatgctccagcacatatatctactattggtgtttgttctatgactgacatagccaagaaaccaactgaaacgatttgtgcaccactcactgtcttttttgatggtagagttgatggtcaagtagacttatttagaaatgcccgtaatggtgttcttattacagaaggtagtgttaaaggtttacaaccatctgtaggtcccaaacaagctagtcttaatggagtcacattaattggagaagccgtaaaaacacagttcaattattataagaaagttgatggtgttgtccaacaattacctgaaacttactttactcagagtagaaatttacaagaatttaaacccaggagtcaaatggaaattgatttcttagaattagctatggatgaattcattgaacggtataaattagaaggctatgccttcgaacatatcgtttatggagattttagtcatagtcagttaggtggtttacatctactgattggactagctaaacgttttaaggaatcaccttttgaattagaagattttattcctatggacagtacagttaaaaactatttcataacagatgcgcaaacaggttcatctaagtgtgtgtgttctgttattgatttattacttgatgattttgttgaaataataaaatcccaagatttatctgtagtttctaaggttgtcaaagtgactattgactatacagaaatttcatttatgctttggtgtaaagatggccatgtagaaacattttacccaaaattacaatctagtcaagcgtggcaaccgggtgttgctatgcctaatctttacaaaatgcaaagaatgctattagaaaagtgtgaccttcaaaattatggtgatagtgcaacattacctaaaggcataatgatgaatgtcgcaaaatatactcaactgtgtcaatatttaaacacattaacattagctgtaccctataatatgagagttatacattttggtgctggttctgataaaggagttgcaccaggtacagctgttttaagacagtggttgcctacgggtacgctgcttgtcgattcagatcttaatgactttgtctctgatgcagattcaactttgattggtgattgtgcaactgtacatacagctaataaatgggatctcattattagtgatatgtacgaccctaagactaaaaatgttacaaaagaaaatgactctaaagagggttttttcacttacatttgtgggtttatacaacaaaagctagctcttggaggttccgtggctataaagataacagaacattcttggaatgctgatctttataagctcatgggacacttcgcatggtggacagcctttgttactaatgtgaatgcgtcatcatctgaagcatttttaattggatgtaattatcttggcaaaccacgcgaacaaatagatggttatgtcatgcatgcaaattacatattttggaggaatacaaatccaattcagttgtcttcctattctttatttgacatgagtaaatttccccttaaattaaggggtactgctgttatgtctttaaaagaaggtcaaatcaatgatatgattttatctcttcttagtaaaggtagacttataattagagaaaacaacagagttgttatttctagtgatgttcttgttaacaactaaacgaacaatgtttgtttttcttgttttattgccactagtctctagtcagtgtgttaatcttacaaccagaactcaattaccccctgcatacactaattctttcacacgtggtgtttattaccctgacaaagttttcagatcctcagttttacattcaactcaggacttgttcttacctttcttttccaatgttacttggttccatgctatacatgtctctgggaccaatggtactaagaggtttgataaccctgtcctaccatttaatgatggtgtttattttgcttccactgagaagtctaacataataagaggctggatttttggtactactttagattcgaagacccagtccctacttattgttaataacgctactaatgttgttattaaagtctgtgaatttcaattttgtaatgatccatttttgggtgtttattaccacaaaaacaacaaaagttggatggaaagtgagttcagagtttattctagtgcgaataattgcacttttgaatatgtctctcagccttttcttatggaccttgaaggaaaacagggtaatttcaaaaatcttagggaatttgtgtttaagaatattgatggttattttaaaatatattctaagcacacgcctattaatttagtgcgtgatctccctcagggtttttcggctttagaaccattggtagatttgccaataggtattaacatcactaggtttcaaactttacttgctttacatagaagttatttgactcctggtgattcttcttcaggttggacagctggtgctgcagcttattatgtgggttatcttcaacctaggacttttctattaaaatataatgaaaatggaaccattacagatgctgtagactgtgcacttgaccctctctcagaaacaaagtgtacgttgaaatccttcactgtagaaaaaggaatctatcaaacttctaactttagagtccaaccaacagaatctattgttagatttcctaatattacaaacttgtgcccttttggtgaagtttttaacgccaccagatttgcatctgtttatgcttggaacaggaagagaatcagcaactgtgttgctgattattctgtcctatataattccgcatcattttccacttttaagtgttatggagtgtctcctactaaattaaatgatctctgctttactaatgtctatgcagattcatttgtaattagaggtgatgaagtcagacaaatcgctccagggcaaactggaaagattgctgattataattataaattaccagatgattttacaggctgcgttatagcttggaattctaacaatcttgattctaaggttggtggtaattataattacctgtatagattgtttaggaagtctaatctcaaaccttttgagagagatatttcaactgaaatctatcaggccggtagcacaccttgtaatggtgttgaaggttttaattgttactttcctttacaatcatatggtttccaacccactaatggtgttggttaccaaccatacagagtagtagtactttcttttgaacttctacatgcaccagcaactgtttgtggacctaaaaagtctactaatttggttaaaaacaaatgtgtcaatttcaacttcaatggtttaacaggcacaggtgttcttactgagtctaacaaaaagtttctgcctttccaacaatttggcagagacattgctgacactactgatgctgtccgtgatccacagacacttgagattcttgacattacaccatgttcttttggtggtgtcagtgttataacaccaggaacaaatacttctaaccaggttgctgttctttatcagggtgttaactgcacagaagtccctgttgctattcatgcagatcaacttactcctacttggcgtgtttattctacaggttctaatgtttttcaaacacgtgcaggctgtttaataggggctgaacatgtcaacaactcatatgagtgtgacatacccattggtgcaggtatatgcgctagttatcagactcagactaattctcctcggcgggcacgtagtgtagctagtcaatccatcattgcctacactatgtcacttggtgcagaaaattcagttgcttactctaataactctattgccatacccacaaattttactattagtgttaccacagaaattctaccagtgtctatgaccaagacatcagtagattgtacaatgtacatttgtggtgattcaactgaatgcagcaatcttttgttgcaatatggcagtttttgtacacaattaaaccgtgctttaactggaatagctgttgaacaagacaaaaacacccaagaagtttttgcacaagtcaaacaaatttacaaaacaccaccaattaaagattttggtggttttaatttttcacaaatattaccagatccatcaaaaccaagcaagaggtcatttattgaagatctacttttcaacaaagtgacacttgcagatgctggcttcatcaaacaatatggtgattgccttggtgatattgctgctagagacctcatttgtgcacaaaagtttaacggccttactgttttgccacctttgctcacagatgaaatgattgctcaatacacttctgcactgttagcgggtacaatcacttctggttggacctttggtgcaggtgctgcattacaaataccatttgctatgcaaatggcttataggtttaatggtattggagttacacagaatgttctctatgagaaccaaaaattgattgccaaccaatttaatagtgctattggcaaaattcaagactcactttcttccacagcaagtgcacttggaaaacttcaagatgtggtcaaccaaaatgcacaagctttaaacacgcttgttaaacaacttagctccaattttggtgcaatttcaagtgttttaaatgatatcctttcacgtcttgacaaagttgaggctgaagtgcaaattgataggttgatcacaggcagacttcaaagtttgcagacatatgtgactcaacaattaattagagctgcagaaatcagagcttctgctaatcttgctgctactaaaatgtcagagtgtgtacttggacaatcaaaaagagttgatttttgtggaaagggctatcatcttatgtccttccctcagtcagcacctcatggtgtagtcttcttgcatgtgacttatgtccctgcacaagaaaagaacttcacaactgctcctgccatttgtcatgatggaaaagcacactttcctcgtgaaggtgtctttgtttcaaatggcacacactggtttgtaacacaaaggaatttttatgaaccacaaatcattactacagacaacacatttgtgtctggtaactgtgatgttgtaataggaattgtcaacaacacagtttatgatcctttgcaacctgaattagactcattcaaggaggagttagataaatattttaagaatcatacatcaccagatgttgatttaggtgacatctctggcattaatgcttcagttgtaaacattcaaaaagaaattgaccgcctcaatgaggttgccaagaatttaaatgaatctctcatcgatctccaagaacttggaaagtatgagcagtatataaaatggccatggtacatttggctaggttttatagctggcttgattgccatagtaatggtgacaattatgctttgctgtatgaccagttgctgtagttgtctcaagggctgttgttcttgtggatcctgctgcaaatttgatgaagacgactctgagccagtgctcaaaggagtcaaattacattacacataaacgaacttatggatttgtttatgagaatcttcacaattggaactgtaactttgaagcaaggtgaaatcaaggatgctactccttcagattttgttcgcgctactgcaacgataccgatacaagcctcactccctttcggatggcttattgttggcgttgcacttcttgctgtttttcagagcgcttccaaaatcataaccctcaaaaagagatggcaactagcactctccaagggtgttcactttgtttgcaacttgctgttgttgtttgtaacagtttactcacaccttttgctcgttgctgctggccttgaagccccttttctctatctttatgctttagtctacttcttgcagagtataaactttgtaagaataataatgaggctttggctttgctggaaatgccgttccaaaaacccattactttatgatgccaactattttctttgctggcatactaattgttacgactattgtataccttacaatagtgtaacttcttcaattgtcattacttcaggtgatggcacaacaagtcctatttctgaacatgactaccagattggtggttatactgaaaaatgggaatctggagtaaaagactgtgttgtattacacagttacttcacttcagactattaccagctgtactcaactcaattgagtacagacactggtgttgaacatgttaccttcttcatctacaataaaattgttgatgagcctgaagaacatgtccaaattcacacaatcgacggttcatccggagttgttaatccagtaatggaaccaatttatgatgaaccgacgacgactactagcgtgcctttgtaagcacaagctgatgagtacgaacttatgtactcattcgtttcggaagagacaggtacgttaatagttaatagcgtacttctttttcttgctttcgtggtattcttgctagttacactagccatccttactgcgcttcgattgtgtgcgtactgctgcaatattgttaacgtgagtcttgtaaaaccttctttttacgtttactctcgtgttaaaaatctgaattcttctagagttcctgatcttctggtctaaacgaactaaatattatattagtttttctgtttggaactttaattttagccatggcagattccaacggtactattaccgttgaagagcttaaaaagctccttgaacaatggaacctagtaataggtttcctattccttacatggatttgtcttctacaatttgcctatgccaacaggaataggtttttgtatataattaagttaattttcctctggctgttatggccagtaactttagcttgttttgtgcttgctgctgtttacagaataaattggatcaccggtggaattgctatcgcaatggcttgtcttgtaggcttgatgtggctcagctacttcattgcttctttcagactgtttgcgcgtacgcgttccatgtggtcattcaatccagaaactaacattcttctcaacgtgccactccatggcactattctgaccagaccgcttctagaaagtgaactcgtaatcggagctgtgatccttcgtggacatcttcgtattgctggacaccatctaggacgctgtgacatcaaggacctgcctaaagaaatcactgttgctacatcacgaacgctttcttattacaaattgggagcttcgcagcgtgtagcaggtgactcaggttttgctgcatacagtcgctacaggattggcaactataaattaaacacagaccattccagtagcagtgacaatattgctttgcttgtacagtaagtgacaacagatgtttcatctcgttgactttcaggttactatagcagagatattactaattattatgaggacttttaaagtttccatttggaatcttgattacatcataaacctcataattaaaaatttatctaagtcactaactgagaataaatattctcaattagatgaagagcaaccaatggagattgattaaacgaacatgaaaattattcttttcttggcactgataacactcgctacttgtgagctttatcactaccaagagtgtgttagaggtacaacagtacttttaaaagaaccttgctcttctggaacatacgagggcaattcaccatttcatcctctagctgataacaaatttgcactgacttgctttagcactcaatttgcttttgcttgtcctgacggcgtaaaacacgtctatcagttacgtgccagatcagtttcacctaaactgttcatcagacaagaggaagttcaagaactttactctccaatttttcttattgttgcggcaatagtgtttataacactttgcttcacactcaaaagaaagacagaatgattgaactttcattaattgacttctatttgtgctttttagcctttctgctattccttgttttaattatgcttattatcttttggttctcacttgaactgcaagatcataatgaaacttgtcacgcctaaacgaacatgaaatttcttgttttcttaggaatcatcacaactgtagctgcatttcaccaagaatgtagtttacagtcatgtactcaacatcaaccatatgtagttgatgacccgtgtcctattcacttctattctaaatggtatattagagtaggagctagaaaatcagcacctttaattgaattgtgcgtggatgaggctggttctaaatcacccattcagtacatcgatatcggtaattatacagtttcctgtttaccttttacaattaattgccaggaacctaaattgggtagtcttgtagtgcgttgttcgttctatgaagactttttagagtatcatgacgttcgtgttgttttagatttcatctaaacgaacaaactaaaatgtctgataatggaccccaaaatcagcgaaatgcaccccgcattacgtttggtggaccctcagattcaactggcagtaaccagaatggagaacgcagtggggcgcgatcaaaacaacgtcggccccaaggtttacccaataatactgcgtcttggttcaccgctctcactcaacatggcaaggaagaccttaaattccctcgaggacaaggcgttccaattaacaccaatagcagtccagatgaccaaattggctactaccgaagagctaccagacgaattcgtggtggtgacggtaaaatgaaagatctcagtccaagatggtatttctactacctaggaactgggccagaagctggacttccctatggtgctaacaaagacggcatcatatgggttgcaactgagggagccttgaatacaccaaaagatcacattggcacccgcaatcctgctaacaatgctgcaatcgtgctacaacttcctcaaggaacaacattgccaaaaggcttctacgcagaagggagcagaggcggcagtcaagcctcttctcgttcctcatcacgtagtcgcaacagttcaagaaattcaactccaggcagcagtaaacgaacttctcctgctagaatggctggcaatggcggtgatgctgctcttgctttgctgctgcttgacagattgaaccagcttgagagcaaaatgtctggtaaaggccaacaacaacaaggccaaactgtcactaagaaatctgctgctgaggcttctaagaagcctcggcaaaaacgtactgccactaaagcatacaatgtaacacaagctttcggcagacgtggtccagaacaaacccaaggaaattttggggaccaggaactaatcagacaaggaactgattacaaacattggccgcaaattgcacaatttgcccccagcgcttcagcgttcttcggaatgtcgcgcattggcatggaagtcacaccttcgggaacgtggttgacctacacaggtgccatcaaattggatgacaaagatccaaatttcaaagatcaagtcattttgctgaataagcatattgacgcatacaaaacattcccaccaacagagcctaaaaaggacaaaaagaagaaggctgatgaaactcaagccttaccgcagagacagaagaaacagcaaactgtgactcttcttcctgctgcagatttggatgatttctccaaacaattgcaacaatccatgagcagtgctgactcaactcaggcctaaactcatgcagaccacacaaggcagatgggctatataaacgttttcgcttttccgtttacgatatatagtctactcttgtgcagaatgaattctcgtaactacatagcacaagtagatgtagttaactttaatctcacatagcaatctttaatcagtgtgtaacattagggaggacttgaaagagccaccacattttcaccgaggccacgcggagtacgatcgagtgtacagtgaacaatgctagggagagctgcctatatggaagagccctaatgtgtaaaattaattttagtagtgctatccccatgtgattttaatagcttcttaggagaatgacaaaaa

SEQ ID NO: 6 - DNA, 29926 bp, Artificial Sequence
  Human coranvrrus HKU1
gagtttgagcgattgacgttcgtaccgtctatcagcttacgatctcttgtcagatctcattaaatctaaactttttaaacaagattccctgttatccatgcttgtgagtgtggtttaatcataatcttgtattttactttccacacttttcatctctctgccagtgacgtgttggttgtcctcagcgtccctcccataggtcgcaatgattaaaaccagcaaatacggtctcggcttcaagtgggcgccagaatttcgttggctgcttccggatgcagcggaggagttggctagtcctatgaagtcagatgagggtgggttatgcccctctactggtcaagcgatggaaagtgttggattcgtttatgataatcatgtgaagatagattgtcgctgcattcttggacaagaatggcatgtgcagtcaaatcttatccgtgatatttttgttcatgaagatctacatgttgtagaagttctaactaaaacagccgtaaagtccggtacggcaattttaattaaatcacctttgcatagcttgggtggttttcctaaagggtatgttatgggcttgttccgttcatacaagactaaacgttatgttgtacatcatctttctatgactacatctactactaattttggtgaagattttttgggttggattgtaccttttggttttatgccatcttatgttcacaaatggtttcaattctgtaggttgtatattgaagagagtgatttaataatttcaaattttaaatttgatgattatgattttagtgtagaagatgcttatgctgaggttcatgctgagcctaaaggtaaatattcacaaaaagcttatgctttacttagacaatatcgtggtattaaacccgtactttttgtagaccagtatggttgtgactattctggtaaattagcagattgtcttcaagcttatggtcattattctttgcaagatatgagacaaaagcagtctgtatggcttgccaattgtgactttgatattgtagtggcttggcatgtagttcgtgattcacgatttgttatgcgcctgcagactatagctactatttgtggtattaaatatgttgcacaacctacagaagatgtagtagatggagatgtagttatacgtgaacctgtacatttattatctgctgatgcaatagttttaaagcttcctagtttgatgaaagttatgactcatatggatgatttttctattaaatctatatataatgttgatttgtgtgattgtggttttgttatgcagtatggttatgtagattgttttaatgataattgtgatttttatggttgggtttcaggtaatatgatggatggtttttcttgtccattgtgttgtacagtttatgactctagcgaagttaaagcccaatcatctggtgttattcctgaaaatcctgtgttatttactaatagtactgatactgttaaccatgattcttttaatttgtatggttattctgtcacaccatttggttcttgtatatattggtcgccgcgtcctggattgtggattcctataattaaatcttcagtcaagtcttatgatgatttggtttattcaggtgtagtaggttgtaaatctattgttaaagaaactgctcttattactcatgcactttacttagattatgttcaatgtaagtgtggtaatcttgaacaaaatcatattcttggcgttaataattcttggtgtaggcaactgttgcttaatagaggtgattataatatgcttctaaaaaatattgacttgtttgttaagcgtcgtgctgattttgcttgcaagtttgcagtttgtggagatggttttgtaccttttttactagatggtttaattccccgtagttattatctaattcagagtggtattttctttacatctttgatgtctcaattttcacaagaagtttctgatatgtgtttaaaaatgtgtattttgtttatggacagagtttcagttgctacattttatatagagcattatgttaataggttggttactcaatttaagttattgggtactacacttgttaataaaatggttaattggtttaataccatgttagatgctagtgcacctgctacaggctggcttctttaccaattattgaatggtctttttgtagtatctcaagccaactttaattttgttgctttaatacctgattatgctaaaattttagttaataaattttacactttttttaagttattattagagtgtgttacagttgatgttttaaaagatatgcctgttcttaaaactattaatggtttagtttgtattgtaggcaataagttttataacgttagtacagggttaattcctggttttgttttaccatgtaatgcacaggaacaacaaatttatttttttgaaggcgttgcagaatctgttatagtagaagatgatgttattgagaatgtcaaatcttctttatcatcttatgagtattgtcaaccacctaaatctgtagaaaaaatttgtattatagataatatgtacatgggtaagtgtggtgataaatttttccctattgtcatgaatgataaaaatatttgtcttttagatcaggcttggcgttttccatgtgcaggtagaaaagttaattttaacgagaaacctgttgttatggagattccgtctttgatgacagttaaggttatgtttgatttagattctacttttgatgatattttaggtaaagtttgttcagaatttgaagtagaaaagggtgttactgtagatgattttgttgctgttgtttgtgatgctatagagaatgctttaaactcttgtaaagagcatccagtggttggttatcaagttcgtgcatttttaaataaacttaatgagaatgttgtttatttatttgatgaggctggtgatgaagcaatggcctctcgtatgtattgtacttttgctattgaggatgttgaagacgttatcagtagtgaagctgtcgaagatactattgatggtgtcgttgaagacactattaatgacgatgaagatgttgttactggtgacaatgacgatgaagatgttgttactggtgacaatgacgatgaagatgttgttactggtgacaatgacgatgaagatgttgttactggtgacaatgacgatgaagatgttgttactggtgacaatgacgatgaagatgttgttactggtgacaatgacgatgaagatgttgttactggtgacaatgacgatgaagatgttgttactggtgacaatgacgatgaagatgttgttactggtgacaatgacgatgaagatgttgttactggtgacaatgacgatgaagatgttgttactggtgacaatgacgatgaagatgttgttactggtgacaatgacgatgaagatgttgttactggtgacaatgacgatgaagatgttgttactggtgacaataacgatgaagagattgttactggtgacaatgatgaccaaattgttgttactggtgatgatgtagatgatattgaaagtatttatgactttgatacttataaagctcttttagtttttaatgatgtctataatgatgctttgtttgttagttatggttctagtgttgaaacagaaacatattttaaagttaatggtttatggtcacctactattacacatactaattgttggttgcgttctgtgttacttgtaatgcagaaattaccttttaagtttaaggatttagctattgaaaatatgtggttatcttataaggtgggttataatcaaagttttgttgattatttactgaccactattcctaaagctattgttttgcctcaaggtggttttgtagctgattttgcttattggtttttaaaccagtttgatattaatgcgtatgctaattggtgttgtttaaaatgtggtttttcttttgatttaaatggtttggatgctttgtttttttatggagatattgtgtctcatgtttgtaagtgtggacataatatgactctaatagcagcggacttaccttgtacattacatttttcattatttgatgacaatttttgtgctttttgcacccctaaaaaaatttttattgctgcatgtgctgtggatgtaaacgtttgtcattctgtagctgttataggtgatgaacaaatagatggtaagtttgttactaaatttagtggtgataaatttgattttatagtaggttatggaatgtcatttagtatgtcttcttttgagttacctcaattgtatggtttgtgtataacacctaatgtatgttttgttaaaggtgatattataaatgttgctagacttgttaaagctgatgttattgttaatcctgctaatgggcatatgctccatggtggtggagttgcaaaagctatagctgtagctgcaggtaaaaaattttctaaagaaactgctgctatggttaaatctaaaggtgtttgccaagtaggagattgttatgtttctaccggtggtaaattatgtaaaacaattcttaatattgtaggccctgatgctagacaagatggaagacaatcttatgttttgttagcacgtgcttataagcatcttaataattatgattgttgtttgtctactctcatatcggctggtatatttagtgttcctgctgatgtgtcattaacttaccttctaggtgttgttgataaacaagttatccttgttagtaataataaagaagattttgatattattcaaaaatgtcaaattacttcagttgttggtactaaagcattggctgttagattaactgctaatgtaggccgtgttattaaatttgagacagatgcatacaaactttttttgagtggtgatgattgttttgtttcaaattcttctgttatacaagaagttttattgcttcgtcatgatatacaattgaataatgacgttcgtgattatttgttgtctaagatgactagtcttcctaaagattggcgtcttatcaataaatttgatgttattaacggtgttaaaactgttaagtattttgagtgtcctaattctatttatatatgtagtcagggtaaagactttggttatgtatgtgatggttctttttataaagcaactgttaatcaagtttgtgttttattagctaagaagatagatgttttgcttactgtagatggtgttaattttaaatctatttctcttactgtaggtgaagtttttggtaaaatacttggtaatgttttctgtgatggcattgatgttactaagttaaagtgtagtgatttttatgccgataaaattttatatcagtatgaaaatttgtctttagctgatatttctgctgtacaaagttcatttgggtttgatcagcaacaattgcttgcttattataattttttaacagtatgtaaatggtctgtagttgttaacggtccatttttttcttttgaacagtctcataataattgttatgtgaatgtagcttgtcttatgttgcagcatattaatcttaaatttaataaatggcagtggcaggaagcatggtatgaatttcgtgctggcagaccacataggttagttgctcttgttttagctaaaggtcattttaaatttgatgaaccatcagatgctactgattttattcgtgttgttttgaaacaagctgatttatcaggtgcaatttgtgaattagaacttatttgtgattgtggtattaaacaagaaagtcgtgttggtgttgatgctgttatgcattttggtacattagcaaagactgatctttttaatggttataagattggctgtaattgtgcaggtagaattgtccattgtactaaattgaatgtaccatttttgatttgttctaatactcctctgagtaaggatttacctgatgatgttgttgcagctaacatgtttatgggtgtaggtgtaggccattatacacatttgaaatgtggttcaccttaccaacattatgatgcttgtagtgttaaaaaatatacaggtgttagtggttgtttaactgactgcttgtatcttaaaaatttaacccagacttttacatctatgttgactaattattttttggatgatgttgaaatggttgcttataaccctgatctttcacaatattattgtgataatggtaagtattatacaaaacctattataaaggctcagtttaaaccatttgctaaagttgacggtgtttatactaactttaagttagttggacatgatatttgtgctcaattgaatgataagttaggttttaatgtagatttgccgtttgttgagtacaaagtaacagtctggcctgtagctactggtgatgttgttttggcatctgatgatttatatgtgaaacgttattttaaaggatgtgaaacttttggtaagcctgttatttggttttgtcatgatgaagcatcattgaattctcttacttattttaataaacctagttttaaatctgaaaatagatatagtgttttgtctgttgattctgtatctgaggagtcacaaggtaatgtggttacttctgttatggaatcgcagattagtactaaagaggttaagttaaagggtgttagaaagactgttaaaatagaagatgctattattgttaatgatgaaaatagttctattaaggttgttaaaagtttatctttagttgatgtttgggatatgtatttgacaggttgtgattatgttgtttgggttgctaatgaattgtcacgcctagttaaatcaccaacagttagggaatatatacgatatggtattaaacctattactatacctatagatttgttatgtttaagagatgataatcaaactcttttagttcctaaaatttttaaagcaagagctatagaattttatggttttttgaagtggttgtttatttatgtttttagtttattacattttacaaatgataaaaccattttttatactacagaaatagcttctaagtttacttttaatttgttttgtttggctcttaaaaatgcttttcagacatttagatggagtatatttataaaaggttttcttgttgtagccactgtgtttttgttttggtttaattttttgtatataaatgttatttttagtgacttttatcttcctaatattagtgtttttcctatttttgtgggaagaattgttatgtggataaaggctacttttggtttggttacaatttgtgatttttattctaagttaggtgtaggttttacaagtcatttttgtaatggtagttttatatgtgaattgtgtcattctggttttgatatgttggatacatatgcagctatagattttgttcagtatgaagtagatagacgtgttttatttgattatgttagtttagtcaaattaattgttgaactcgttattggttattcattatacacagtatggttttatccattattttgtcttattggtttacaattatttactacatggttgcctgatttgtttatgttagaaactatgcattggttgattagatttattgtatttgtagctaatatgttacctgcttttgtcttgttgcggttttatatagttgttactgctatgtataaagtagttggttttattaggcatattgtctatggttgtaataaagctggttgtttattttgttataaacgaaattgtagtgttcgtgttaagtgtagtactattgttggtggtgtaattcgttattatgatattactgctaatggtggtactggtttttgtgttaaacatcaatggaattgttttaattgccattcttttaaaccaggtaacacttttataactgtagaagctgctatagaactttctaaagagcttaaacgacctgtaaatccaactgatgcttcacattatgtagttactgatattaagcaagttggttgtatgatgcgtttgttctatgatagagatggacagcgtgtttacgatgatgttgatgctagtttatttgtagatattaataatctgttacattctaaagttaaagttgttcctaatttgtatgtagttgtagtagagagtgatgctgatagagctaattttctgaatgctgttgtgttttatgcacaatcattgtataggcctatattacttgtagacaaaaagttaattactacagcttgtaatggtatctctgtaacccagactatgtttgatgtttatgttgatacttttatgtctcattttgatgttgatagaaagagttttaataattttgttaacattgctcatgcttctcttagagagggtgtgcaattagaaaaggttttagatacttttgtgggatgtgtacgtaaatgttgttccattgattcagatgttgaaacaagatttattactaaatctatgatatctgcagtagctgctggtttggaatttactgatgaaaattataacaatttggtacctacatatttaaagagtgataatattgtagctgctgatttaggtgttcttatacagaatggtgctaagcatgtacagggtaatgttgctaaggcagctaatatttcttgtatatggtttattgatgcttttaatcaacttactgctgatttacagcataaattaaaaaaagcatgtgttaaaactggcttgaagttaaaattgacttttaataagcaagaggcaagtgtccctattcttacaacacccttttcacttaaaggaggtgttgtattgagtaatttgttatatatattattttttgttagtttaatctgttttatattattgtgggctttattgcctacatatagtgtttataagtctgatattcatttgcctgcttatgctagttttaaagttattgataatggtgttgttagagatatttcagttaatgatttatgttttgctaataaatttttccaatttgatcaatggtatgagtccacttttgggtctgtttactatcataattctatggattgccctattgtagtggcagttatggatgaagatatcggttctactatgtttaatgttcctactaaagttttgagacatggctttcatgttttacattttttaacttatgcatttgctagtgatagtgttcagtgctatacaccacatattcagatttcttataatgatttttatgctagtggttgtgttttatcatctttgtgtactatgtttaaaagaggtgatggtacaccacatccttattgttattcagatggtgttatgaagaatgcttctttgtatacatctttggttccacatacacgttatagccttgctaattctaatggttttataagatttcctgatgttattagtgaaggtattgtacgtattgtaagaacgcgctctatgacttattgtagagtgggtgcatgtgaatacgccgaagagggtatatgttttaattttaatagttcctgggttttgaataatgattattatagaagtatgcctggaactttttgtggtagagatctttttgatttgttttatcaattttttagtagtttaattcgtcctatagatttcttttctcttactgctagttctatttttggagctatattggctatagttgttgtcttggttttttattatttaataaaacttaagcgtgcttttggagattatactagtgttgtagttataaatgttgttgtttggtgtattaattttcttatgctttttgtttttcaagtttatcctatttgtgcatgtgtttatgcttgtttttatttttatgtaacattgtattttccttctgaaattagtgtaattatgcatttgcaatggattgttatgtatggtgctataatgcctttttggttttgtgtcacatatgtagctatggttattgcaaaccatgttttatggttattttcatattgtaggaaaattggtgttaatgtatgtagtgatagtacatttgaagaaacatctcttactacttttatgattactaaagattcttattgtagattaaagaattctgtttctgatgttgcctacaatagatatttgagtttgtataataagtatcgttactatagtggtaaaatggatactgctgcctatagagaagcggcgtgttctcagttagctaaagctatggaaacatttaatcacaataatggtaatgatgtcttataccaacctcctacagcatctgtttctacatcttttttgcaatcaggtattgtaaagatggtatctcctacgtcaaaaattgaaccttgtattgttagtgttacttatggtagtatgactttgaatggtttatggttagatgacaaagtttattgtcctcgtcatgttatatgttcatcctctaatatgaacgaacctgattattctgccttattgtgtagagttactctaggtgattttactataatgtctggtcggatgagtttaacagttgtgtcttaccagatgcagggctgtcaacttgttttgacagtctctttacaaaatccttacactccaaaatatacttttggtaatgttaaacctggtgaaacttttactgttttagctgcgtataatggccgaccacaaggggcatttcatgttactatgcgtagtagttatactattaaaggttcttttttgtgtgggtcatgtggatctgttggttatgtattaacaggtgatagtgttaagtttgtatatatgcatcaattagagctcagtactggttgtcacactggcactgattttactggtaatttttatggtccatatagagatgctcaagttgtacagttgccagttaaggactacgtccagactgttaatgttattgcttggctctatgcagctatacttaataattgtgcttggtttgtacaaaatgatgtttgttctactgaagattttaatgtttgggctatggcaaatggttttagccaagtaaaagcagatcttgtcttagatgctttggcttcaatgacaggtgtttctattgaaactttattggctgctattaagcgtctatatatgggatttcaaggtcgtcaaatactaggaagttgtacttttgaagatgaattggcaccttctgacgtttatcaacaattggctggtgttaaattgcaatctaaaacaaaaagatttattaaagaaacaatttattggattttgatatctacatttttgtttagttgtataatttctgcatttgttaaatggactatatttatgtatattaatacacatatgattggtgttacattatgtgtactttgttttgttagttttatgatgttactagttaaacataagcatttttatttgactatgtatataattcctgtactctgtaccttgttttatgtaaattatttagttgtttataaggaaggttttagaggttttacttatgtctggctctcatattttgttcctgctgtgaattttacttatgtttatgaagtattttatggttgtattttatgtgtttttgctatttttataactatgcatagtattaatcatgacattttttctttgatgtttttggttggtagaatagttactttaatttctatgtggtattttgggtcgaatttagaagaggatgttttgttatttattacagcctttttaggtacttatacatggaccactattttgtcattagctatagcaaaaattgttgctaattggttgtctgttaatatattttattttacagatgtaccttatattaaattgattctcttgagttacttatttatagggtatattttatcttgttattggggatttttctctcttttaaacagtgtttttagaatgcctatgggtgtttataattataaaatttctgttcaagaattgcgttatatgaatgctaatggcttacgtccacctcgtaatagttttgaggctattttgttaaatttaaaactgcttggaataggtggcgtgccagttattgaagtctcccaaattcaatcaaaattgactgatgtgaaatgtgctaatgttgttttgttaaattgtttacagcatttgcatgttgcttctaattctaagttgtggcagtattgtagtgttttacataatgaaatactatctacttcagatttgagtgtagcttttgataagcttgctcaattattgattgttttattcgccaatcctgctgcagttgatactaagtgtcttgcaagtatagatgaagttagcgatgattatgttcaagatagtaccgttttgcaggctttgcaaagtgagtttgtaaatatggctagttttgttgaatatgaagtcgcaaagaaaaatttggctgatgctaaaaatagtggttctgttaatcaacaacagataaaacagttagaaaaagcatgtaatatagctaagtctgtgtatgaacgtgataaagctgtagctcgcaaacttgaacgtatggcagacctagcacttactaacatgtataaagaggctcggattaatgataagaagagtaaagttgtttccgctttgcagacaatgctttttagcatggttcgtaaattggataatcaggctttaaattctattctggataatgctgttaaaggttgtgtacctttgagtgctattccagcattggctgctaatactttaactatagtaataccagataaacaagtttttgataaagttgttgataatgtttatgttacatatgctggtagtgtatggcatatacagactgttcaagatgctgatggtattaataaacagttaactgatattagtgttgattctaattggcctcttgttatcattgcgaacaggtataatgaagttgctaatgctgttatgcagaataatgagttgatgcctcataaattaaaaatacaagttgttaatagtggttctgatatgaattgtaatattcctactcaatgttattataataatggtagtagtggtagaatagtttatgctgttcttagtgatgttgatggtcttaagtatactaagataatgaaagatgatggaaattgtgttgttttagagcttgatcctccttgtaaattttctatacaagatgttaagggacttaaaattaagtatctttattttattaaaggatgtaacactttagctagagggtgggttgttggtactttatcttcaacaattagattgcaggctggtgttgctactgagtatgcagctaattcttctatactttcattatgtgcattttctgtagatcctaagaaaacttatttagattatatacaacaaggtggtgtacctataattaattgtgttaaaatgctctgtgatcatgctggtactggtatggccattactattaaacctgaggctactattaaccaagattcttatggtggtgcctcagtttgtatttattgccgtgcacgtgtagagcatccagatgtagatggtatatgtaaattacgtggtaaatttgtacaagtccctttgggtataaaagatcctattctttatgtgttaacacatgatgtttgtcaagtctgtggtttttggagagatggcagttgttcctgtgtaggttcaagtgtcgctgttcaatctaaagatttaaattttttaaacgggttcggggtactagtgtgaatgcccggctagtaccctgtgctagtggtttatctactgatgttcaattaagggcatttgacatttgtaataccaatagagctggtataggtttatattataaagtgaattgttgccgttttcagcgtatagatgacgacggtaataaattggataagttctttgttgtcaaaagaactaatttagaagtttataataaagagaaaacttattatgagttgactaaaagttgtggtgttgtggctgaacatgatttctttacatttgatattgatggtagtcgcgtgccacatatagttcgtaggaatctttcaaagtatactatgttagatctttgctatgcattgcgtcattttgatcgtaatgattgttcaatattgtgtgaaattctttgtgagtatgctgattgtaaagaatcctacttttctaagaaagattggtatgattttgttgaaaatcctgatattattaatatatataaaaaattaggccctatttttaatagagctttacttaatactgtcatttttgcagacaccttagttgaagtaggtttagttggtgttttaactttagataaccaagatttgtatggtcaatggtatgattttggtgattttatacaaacagccccagggtttggtgtggcagttgcagattcttactattcttatatgatgcctatgttgactatgtgtcatgtattagattgtgaattatttgttaatgatagttatagacaattcgatcttgtacagtatgattttactgattacaagttagagttgtttaataagtattttaagtattggggtatgaagtatcatcctaatactgtggattgtgataatgataggtgtattattcattgtgctaattttaatatactatttagtatggttttacctaatacttgttttggtccccttgttagacaaatttttgtagatggtgtaccgtttgttgtttctattggttaccattacaaagagttaggtgtagttatgaacttagatgttgacacacaccgttatcgtttgtctcttaaagatttacttctttatgcagcagatcctgctatgcacgttgcatctgctagtgctctgcttgatttacgaacttgttgttttagtgtagctgccattacaagtggtataaaatttcaaactgtaaaaccaggtaactttaaccaagacttttacgagtttgttaaaagtaaaggcttgtttaaagagggtagtacagttgatttgaaacattttttctttactcaagatggtaatgctgcaattactgattataattattataagtataatttacctactatggttgatattaagcagttattgtttgtattagaagttgtttataaatattttgaaatttatgatggtggttgtataccagcatcacaagttattgttaataattatgataaaagtgctggttatccatttaataaatttggtaaagccagactttattatgaggcattatcatttgaggaacagaatgaaatttatgcatatactaaacgtaatgttctgcccaccttaactcaaatgaatttaaaatatgctatcagtgctaagaatagagctcgcactgtagcaggtgtttctattcttagtactatgacaggccgaatgttccatcaaaaatgtttgaagagtatagcagctacccgaggtgttcctgttgttataggaaccactaaattttatggtggttgggacgatatgttacgtcatcttataaaggatgttgacaaccctgttcttatgggttgggattatcctaaatgtgatcgtgctatgccaaatattttgcgtattgttagtagtttagttttggcccgcaaacatgaattttgttgttcacatggtgatagattttatcgccttgcgaatgaatgtgctcaagttttgagtgaaatagttatgtgtggcggttgctattatgttaagcctggtggtactagcagtggtgatgcaactactgcttttgctaattctgtttttaatatatgtcaggctgttactgctaatgtttgttctcttatggcctgtaatggccataagattgaagatttaagtatacgcaatttacaaaaacgcttatactctaatgtttatcgtacagattatgttgattatacatttgttaatgagtattatgaatttttatgtaagcattttagtatgatgattttgagtgatgatggtgttgtctgttataactctgattatgctagtaagggttatatagctaatataagtgtttttcaacaagttttgtactatcagaataatgtctttatgtctgaatctaaatgttgggttgaaaatgatattactaatggtcctcatgaattttgttcccaacatactatgttagttaagatagatggtgattatgtttatttaccatatccagatccttctagaattttaggagctggttgttttgttgatgatttattgaagactgacagtgttcttttgatagagcgctttgtaagtctagctatagatgcttaccctttagtacatcatgaaaatgaagaataccaaaaagtctttcgtgtatatttagaatatataaaaaaactgtataatgatcttggtactcagatcttagatagttatagtgttattttaagtacttgtgatggtttaaagtttactgaagaatcattttacaagaatatgtatttaaaaagtgccgtgatgcagagtgtaggtgcatgcgttgtttgttcatcacaaacttctttgcgttgtggcagttgtatacgtaagcctttgttatgttgtaaatgttgttatgaccatgttatggcaactaatcataaatatgttttgagtgtctcaccttacgtttgtaatgcacctaactgtgatgtgagtgatgtcaccaaattatatttgggcggtatgtcttactattgtgaaaaccataaaccccattattcatttaagttagttatgaatggtatggtctttggtttgtataaacaatcttgcacgggttcaccttatatagatgattttaataagatagctagttgtaaatggacagaagttgatgattatgttctggcaaatgagtgtattgaacgtttaaagttatttgctgcagaaactcaaaaggcaactgaagaggcttttaaacaaagctatgcttctgctaccattcaagagattgttagtgatagagaagttattttgtgttgggagacaggtaaagttaaaccaccacttaataaaaattatgttttcacaggctaccattttactagtactggtaagacagttttaggtgagtatgtttttgataaaagtgaattaactaacggtgtgtattaccgcgctacaactacttataaactttctataggtgatgtttttgttttaacatcacattctgtagctagtttaagtgcacctacacttgtcccacaagagaactatgctagtataagattttctagtgtttatagtgttccattggtgtttcaaaataatgttgctaattatcagcacattggaatgaaacgttattgcactgttcaaggtccccctggtacgggaaagtctcatcttgctataggtctagctgtttattactacacagcacgtgtagtttatactgctgctagtcatgctgctgtagatgcattgtgtgaaaaagcttataagtttttaaatattaacgattgtacacgtattattcctgctaaagttcgtgtagattgttatgataagtttaaaattaatgataccacttgtaagtatgtttttaccacaataaatgcattaccagagttggttacagatattgttgttgttgatgaagttagtatgcttactaattatgaattgtctgttataaatgctcgtattaaagctaaacattatgtatatattggagatcctgctcaattacctgcaccacgtgtgctgttgagcaagggttctttagaacctaggcacttcaattctattactaaaataatgtgttgtttaggtcctgatatctttttgggaaattgttataggtgtcctaaagaaattgtagaaactgtttcagcattggtttatgataataaactcaaggctaaaaatgataatagttcattatgttttaaagtatattttaagggacagacaacacatgagagttcaagtgctgtaaatattcaacagatatatctaattagtaaatttttaaaagctaatccagtttggaatagtgctgtttttattagtccttataatagtcagaattatgttgctaagcgtgttttaggtgttcaaacacaaactgtagattctgctcaaggttcggaatatgattatgttatatattcacaaacagcagaaacagcccattctgttaatgttaatcgatttaatgttgccataactagagccaagaagggcattttttgtgttatgagtaatatgcaattatttgaatctcttaattttattactctacctttagataaaattcaaaatcaaactttacctcgtttgcattgcacaactaatctttttaaagattgtagtaaaagttgcttaggttatcatccagcgcatgccccctcatttttagcagttgatgataaatataaggttaatgaaaatttggctgtaaatttaaatatttgtgaacctgttttaacatattctcgtttaatatctcttatgggttttaaattagatttgactcttgatggttattctaaattgtttattactaaagatgaagccattaaacgtgttagaggttgggttggttttgatgttgagggcgctcatgctactcgcgaaaacattggaacaaactttccactgcaaataggtttttcaactggtgtggattttgtagttgaagctactggcttatttgctgagagagattgttatacttttaaaaaaactgtagctaaagctcctcctggtgaaaaatttaaacatttaataccccttatgtcaaaaggtcaaaagtgggatattgttagaattagaattgttcaaatgttatctgattatcttttagacctttctgatagtgtagtatttattacttggtctgccagttttgaacttacttgtttaaggtattttgctaaattaggcagagagcttaattgtaatgtgtgttctaatcgtgctacatgctacaattctagaactggttattatggttgttggcgccatagttatacttgtgattatgtgtataatccacttattgtagatatacaacagtggggttatacaggttctttaactagtaatcacgatataatttgtaatgtacataaaggtgcacatgttgcgtcagctgatgcaattatgactcgttgtttagcaatctatgattgtttttgtaaatctgttaattggaatttagagtatccaataatttctaatgaggtcagtataaatacatcttgtaggttattgcagcgtgtcatgcttaaagctgccatgctatgtaatagatacaacttatgttatgacataggcaatcctaaaggtttagcttgtgtcaaagattatgaatttaaattttatgatgcttttcctgtagccaagtctgttaaacagttattttatgtctatgatgtgcataaagataattttaaagatggtttatgtatgttttggaattgtaatgttgataaatatccatctaattcaattgtttgtagatttgacactcgagtgttaaataaattaaaccttcctggatgtaatggtggtagtttgtatgttaataaacatgcattccatactaatccttttactagaactgtttttgaaaatcttaagcctatgccttttttctattattcagatacgccttgtgtgtacgtagatggtttagaatctaaacaagttgattacgttcctttaagaagcgccacttgtatcacacggtgtaatctaggtggagctgtttgttcaaagcatgctgaagaatattgtaactaccttgagtcttataatatagttactacagcaggctttactttttgggtttataagaattttgatttttataatttatggaacacttttactacgttacagagtttagaaaacgtaatatataacttggttaatgttggtcattatgatggacgtacaggtgaattaccttgtgctattatgaatgacaaagttgttgttaagattaataatgtagatactgttatttttaaaaataatacatcatttcctactaatatagctgttgaattgtttacaaaacgtagtatccggcaccaccctgaacttaagattcttagaaatttgaacattgatatttgttggaagcatgtcctgtgggattatgttaaagatagtttgttttgtagttccacttatggtgtttgtaaatacacagatttgaagttcatcgaaaatttgaatatactttttgatggtcgtgacactggcgctttagaagcttttagaaaagcaagaaatggtgtttttattagtactgaaaaattaagtaggttatcaatgattaaaggtccgcaacgagctgatttaaatggtgtgattgtggataaagttggagaactcaaagttgagttttggttcgctatgagaaaagatggtgacgatgttatcttcagccgaacagacagcctatgctcaagccattactggagcccacaaggtaatctaggtggtaattgcgcgggtaatgtcattggtaatgatgctctaacacgttttactatctttactcagagtcgtgtattgtcaagttttgaacctcgctcagatttagaacgggattttattgatatggatgataatctgtttattgctaaatatggtttagaagactatgcatttgatcatatagtttatggtagttttaaccataaagttataggaggtttgcatttgcttataggcttatttcgtaggaaaaaaaaatctaatttgttaattcaagagtttttacagtatgattctagtattcattcatattttattactgatcaggagtgtggtagtagtaagagtgtttgtacagttattgatttattattagatgattttgtttctattgttaagtcattaaatttgagttgtgttagtaaagttgttaatattaatgttgattttaaggattttcaatttatgttgtggtgtaatgataataaaattatgactttttatcctaaaatgcaagccactaatgattggaaacctggctattctatgcctgttttgtataagtatttgaatgttccattagagagagtctctttatggaattatggtaaacctattaatttgcctacaggctgtatgatgaatgttgctaagtacactcaattatgtcagtatttgaatactacaacattagctgttcctgttaatatgcgtgttttacatttaggtgcagggtctgataaagaagtagctccaggttctgctgttttaagacagtggttaccatctggtagtattcttgtagataatgatttaaacccatttgttagcgatagtttagttacttattttggagattgtatgactttaccatttgattgtcattgggatttgataatatctgatatgtatgatcctcttactaaaaatattggtgattataatgtgagtaaggatgggttttttacttacatttgtcatttaattcgtgataaattatctttgggtggtagtgtagctataaaaattacagagttttcttggaatgctgatttatataaattaatgagttgttttgcattttggacagttttttgtactaatgtaaatgcttcttctagtgaagggtttttaataggtataaattacctgggtaaatcttcttttgaaatagatggcaatgttatgcatgctaactatttgttttggagaaatagtacaacatggaatggcggtgcttatagtttatttgatatgactaaattttctttgaaattggctggcactgctgttgttaatttaagaccagatcaattaaatgatttagtttattctcttattgaaagaggtaaattattagttcgcgatacgcgtaaagagatttttgttggtgatagtcttgtaaatacttgttagatctcattaaatctaaactatgttaattatttttttatttttttatttctgttatggttttaatgaacctcttaatgttgtgtctcatttaaaccatgactggtttttatttggtgatagtcgttctgattgtaaccatattaataatttaaaaattaaaaattttgattatttggatattcaccctagtttgtgcaacaatggtaagatttcatctagtgccggtgattctatttttaagagttttcatttcactcgattttataattacactggcgaaggtgatcaaattattttttatgagggtgttaattttaatccttatcatagatttaagtgttttcctaatggtagtaatgatgtatggcttcttaacaaggtaagattttatcgtgccttatattctaatatggccttttttcgttatcttacttttgttgatattccttataatgtttctctttctaagtttaattcttgtaaaagtgatattttatcacttaacaatcctatttttattaattattctaaggaagtttattttactttattaggttgttctctttatttagtaccgctttgcctttttaaatctaactttagtcagtactattataacatagatactggctctgtttatggtttttctaatgttgtttatcctgatttagactgtatttatatttctcttaaaccaggttcttataaagtttccaccactgcaccttttttatccttacctactaaagctctctgttttgataaatctaaacaatttgtacctgtacaggttgttgattctagatggaacaacgagcgtgcctcagatatttctttatctgttgcatgtcaattgccatattgttattttcgcaattcttctgctaattatgttggcaagtatgatattaaccacggtgatagtggttttatttctattttatctggtcttttatataatgtttcttgtatttcatattatggtgtatttttatatgataattttacatccatttggccctattattcttttggtaggtgtcctacatcttctattattaaacatccaatttgtgtttatgattttttgcctattattttacaaggtattttattatgtttagctttactttttgttgtttttctattatttttgttatataacgataaatctcattaaatctaaacatgttattaattatttttattttgcctacaacattagctgttataggtgattttaattgtactaattttgctattaatgatttaaacaccacagttcctcgcataagtgagtatgttgtggatgtttcttatggtttgggtacatattatatacttgatcgtgtttatttaaatactactatattatttactggttatttccctaaatctggtgccaattttagggatctatctttaaaaggtactacatatttgagtactctttggtatcagaaaccctttttatctgattttaataatggtattttttctagagttaagaatactaagttgtatgttaataaaactttgtatagtgagtttagtactatagttataggtagtgtttttattaacaactcttatactattgttgttcaacctcataatggtgttttggagattacagcttgtcaatacactatgtgtgagtatcctcatactatttgtaaatctaaaggtagttctcgtaatgaatcttggcattttgataaatctgaacctttgtgtctgttcaagaaaaattttacttataatgtttctacagattggttgtattttcatttttatcaagaacgtggcactttttatgcttattatgctgattctggcatgcctactacttttttatttagtttgtatcttggtactcttttatctcattattatgttttgcctttgacttgtaatgctatatcttctaatactgataatgagactttacaatattgggtcacacctttgtctaaacgccaatatcttcttaaatttgacaaccgtggtgttattactaatgctgttgattgttctagtagtttctttagcgagattcaatgtaaaactaaatctttattacctaatactggtgtttatgacttatctggttttactgttaagcctgttgcaactgtacatcgtcgtattcctgatttacctgattgtgacattgataaatggcttaacaattttaatgtaccctcacctcttaattgggaacgtaaaattttttctaattgcaactttaatttgagtactttgcttcgtttagttcatactgattctttttcttgtaataattttgatgaatctaagatatatggtagttgttttaagagtattgttttagataaatttgccatacccaactccagacgatctgatttgcagttgggcagttctggttttctgcaatcttctaattataaaattgacactacttctagttcttgtcaattgtattatagtttgcctgcaattaatgttactattaataattataatccttcttcttggaatagaaggtatggttttaataattttaatttgagctctcatagtgttgtttactcacgttattgtttttctgttaataatactttttgtccttgtgctaaaccttcttttgcttcaagttgcaagagtcataaaccaccttctgcttcctgtcctattggtactaattatcgttcttgtgagagtactactgtactcgaccacactgactggtgtaggtgttcttgtttacctgatcctataactgcttatgaccctaggtcttgttctcaaaaaaagtctctggttggtgttggtgaacattgtgcagggttcggtgttgatgaagaaaagtgtggtgtattggatggatcatataatgtttcttgtctttgtagtactgatgcctttctaggttggtcttatgacacttgcgtcagtaacaaccgttgtaatattttttctaattttattttaaatggtatcaatagtggtaccacttgttctaatgatttattgcagcctaatactgaagtttttactgatgtttgtgttgattacgacctttatggtattacaggacaaggtatttttaaagaagtttctgctgtttattataatagttggcaaaatcttttgtatgattctaatggcaacattattggttttaaagattttgttactaataaaacatataatattttcccttgttatgcaggaagagtttctgctgcttttcatcaaaatgcttcctctttggctttactttatcgtaatttaaaatgtagctatgttttgaataatatttctttaactactcagccatattttgatagttatcttggttgcgtttttaatgctgataatttaactgattattctgtttcttcttgtgctcttcgcatgggtagtggtttttgtgttgattataactcaccttcttcttcctcttcgcgtcgtaaacgtagaagtatttctgcttcttatcgttttgttacttttgaaccctttaatgtcagttttgttaatgacagtattgagtctgtgggtggtctttatgagatcaaaattcccactaactttactatagttggtcaagaggaatttattcaaactaattctcctaaagttactattgattgttctttatttgtctgttctaattatgcagcttgccatgacttattgtcagagtatggcactttttgtgataatattaatagtattttagatgaagttaatggtttacttgatactactcaattgcatgtagctgatactcttatgcaaggtgtcacacttagctccaatcttaatactaatttgcattttgatgttgataatattaattttaaatccctagttggatgtttaggtccacactgcggttcttcttctcgttctttttttgaagatttattgtttgacaaagttaaactttcagatgttggttttgttgaagcttataacaattgtactggtggtagtgaaattagagatcttctttgtgtacaatcctttaatggtattaaagttttgcctcctattttgtctgaatctcaaatttctggttacaccacagccgctactgttgctgctatgtttccaccatggtcagcagcagctggcataccattttctcttaatgtacaatatagaattaatggtttgggtgttactatggatgttcttaataaaaatcaaaagttgatagctactgcttttaataatgctcttctttctattcagaatggttttagtgctaccaactctgcacttgctaaaatacaaagtgttgttaattctaatgctcaagcacttaatagtttgttacagcaattatttaataaatttggtgcaattagttcttctttacaagaaattttatctcgtctcgatgctttagaggctcaggttcagattgataggcttattaatggtcgtttaactgctttaaatgcttatgtctctcaacagcttagtgatatttctcttgtaaaatttggtgctgctttagctatggagaaggttaatgagtgtgttaaaagtcaatctcctcgtattaatttttgtggtaatggtaatcatattttgtcattagttcaaaatgctccttatggtttgttgtttatgcattttagttataaacctatttcttttaaaactgttttagtaagtcctggtttgtgtatatcaggtgatgtaggtattgcacctaaacaagggtattttattaaacataatgatcattggatgttcactggtagttcttactattatcctgaaccaatttcagataaaaatgttgtttttatgaatacttgttctgttaattttactaaagcgcctcttgtttatttgaatcattctgtaccaaaattgtctgattttgaatctgagttatctcattggtttaaaaatcaaacatccattgcgcctaatttgactttaaatcttcatactattaatgctacttttttagatttgtattatgagatgaatcttattcaagagtctattaagtctttgaataatagttatatcaatcttaaagatataggtacatatgaaatgtatgtaaaatggccttggtatgtttggctactaatttctttttcatttataatattccttgtattgctcttttttatatgttgttgtactggttgtggttctgcatgttttagtaaatgtcataattgttgtgatgagtatggtggtcatcatgattttgttatcaaaacatctcatgatgattagaatctcttgtcagatctcattaaatctaaactttatttatggacgtttggagacctagctacacacattctcttgttattagagaatttggtgttacaaaccttgaagatttgtgtctaaagtataattactgtcaacctattgttggttactgtattgtacctttaaatgtttggtgtcgcaagtttggcaaatttgcttctcactttacattacgtagtcacgatatttcccatagtaataattttggtgttgtaactagttttactacttatggtaatactgtttctgaggctgtgtctagattagttgaatcagcttctgaatttattgtttggcgtgcagaggcacttaataagtatggttgatttatttttcaatgatactgcttggtacataggacagattttagttttagttttattttgtcttatttctttaatctttgttgttgcttttttagcaactattaagctttgtatgcaactttgtggtttttgtaatttctttattatttcaccttcggcttacgtttataaaagaggtatgcagttgtataagtcttatagtgaacaagttataccacccacttcagattatttaatctaaatctaaacattatgaataaatcttttcttcctcaatttacttctgatcaagctgttacattcttaaaagaatggaatttctctttgggtgtaatactactttttattactatcatattgcagttcggttatacgagccgtagtatgtttgtttatcttatcaagatgattattctttggcttatgtggccattgactatcaccttgactatatttaattgtttttatgctttgaataatgcttttcttgcattttctatagtgtttactattatttctattgttatatggattctttattttgttaatagtattcggctttttattagaactggcagttggtggagttttaatccagagaccaataatcttatgtgtattgatatgaaaggcaagatgtttgttaggccagttattgaggactatcacacattaactgctactgttattcgtggtcatctttatatacagggtgtcaaacttggcactggttatactctttcagatttgcccgtatatgttactgtagctaaggtgcaagtactttgtacctataaacgtgcctttttagataagttagatgttaatagtggttttgctgtttttgttaagtctaaagttggtaactatcgtttaccgtctagtaaacctagtggtatggatactgccttgttaagagcttaaatctaaactattaggatgtcttatactcccggtcattatgctggaagtagaagctcctctggaaatcgttcaggaatcctcaagaaaacttcttgggctgaccaatctgagcgaaattaccaaacctttaatagaggcagaaaaacccaacctaaattcactgtgtctactcaaccacaaggaaatactatcccacattattcctggttctccgggatcactcaatttcaaaaaggtagagactttaaattttcagatggtcaaggagttcccattgctttcggagtacccccttctgaagcaaaaggatattggtatagacacagccggcgttcttttaaaacagctgatggtcaacaaaagcagttgttaccgagatggtatttctactatctcggtaccggcccatatgccaatgcatcctatggtgaatccctcgaaggggtcttctgggttgctaatcaccaagctgacacttctactccctccgatgtttcgtcaagggatcctactactcaagaagctatccctactaggtttccgcctggtacgattttgcctcaaggctattatgttgaaggctcaggaaggtctgcttctaatagtcgaccaggttcacgttctcaatcacgtggacccaataatcgttcattaagtagaagtaattctaattttagacattcagattctatagtaaaacctgatatggctgatgagatcgctaatcttgttttagccaagcttggtaaagattctaaacctcagcaagtcactaagcaaaatgccaaggaaatcaggcataaaattttaacaaaacctcgccaaaagcgaactcctaataaacattgtaatgttcaacagtgttttggtaaaagaggaccttctcaaaattttggtaatgctgaaatgttaaagcttggtactaatgatcctcagtttcctattcttgcagaattagctcctacaccaggtgcttttttctttggttctaaattagacttggttaaaagagattccgaggctgactcacctgttaaagatgtttttgaacttcattattctggttctattaggtttgatagtactttaccaggctttgagacaattatgaaagttcttgaagagaatttaaatgcttacgttaattctaatcagaacactgattctgattcgttgagttctaaacctcagcgtaaaagaggtgttaaacaattaccagaacagtttgactctcttaatttaagtgctggtactcagcacatttcaaatgattttactcctgaggatcatagtttacttgctactcttgatgatccttatgtagaagactctgttgcttaatgagaatgaatcctaattcgacactaggtggtaacccctcgctattattcggaataggacactctctatcagaatgaattcttgctgtaataacagatagagtaggttgttacagactatatattaattagtagaaattttatatttagacatttgattgttagagtagttataaggtttagctgtagtataaacgcctccgggaagagctatcaattgtagtgtttaatatatatattagtatatgattgaaattaattatagccttttggaggaattac

SEQ ID NO: 7 - DNA, 30681 bp, Artificial Sequence
  Human coronavirus OC43 strain
  misc_feature (65)..(65): n is a, c, g, or t
  misc_feature (5804)..(5816): n is a, c, g, or t
  misc_feature (5856)..(5886): n is a, c, g, or t
  misc_feature (6662)..(6662): n is a, c, g, or t
  misc_feature (7706)..(7706): n is a, c, g, or t
  misc_feature (9733)..(9746): n is a, c, g, or t
  misc_feature (10582)..(10585): n is a, c, g, or t
  misc_feature (11001)..(11019): n is a, c, g, or t
  misc_feature (12663)..(12679): n is a, c, g, or t
  misc_feature (15561)..(15616): n is a, c, g, or t
  misc_feature (18638)..(18638): n is a, c, g, or t
  misc_feature (25498)..(25498): n is a, c, g, or t
atctcttgttagatctttttgtaatctaaactttataaaaacatccactccctgtaatctatgcntgtgggcgtagatttttcatagtggtgtttatattcatttctgctgttaacagctttcagccagggacgtgttgtatcctaggcagtggccctcccataggtcacaatgtcgaagatcaacaaatacggtctcgaactacactgggctccagaatttccatggatgtttgaggacgcagaggagaagttggacaaccctagtagttcagaggtggatatgatttgctccaccactgcgcaaaagctggaaacagacggaatttgtcctgaaaatcatgtgatggtggattgtcgccgacttcttaaacaagagtgttgtgtgcagtctagcctaatacgtgaaattgttatgaatgcaagtccatattatttggaggtgctacttcaagatgctttgcagtcccgtgaagcagttttggttacaacccccttaggtatgtccttagaggcatgctatgtgagaggttgtaatcctaaaggatggaccatgggtttgtttcggcgtagaagtgtgtgtaacactggtcgttgcactgttaataagcatgtggcctatcagttatatatgattgatcctacgggtgtctgtcttggtgcaggtcaattcgtgggttgggtcatacccttagcctttatgcctgtgcaatcccggaaatttattgttccatgggttatgtacttgcgtaagcgtggcgaaaagggtgcttataataaagatcatggatgtggcggttttggacatgtttatgattttaaagttgaagatgcttatgaccaggtgcatgatgagcctaagggtaagttttctaagaaggcttatgctttaattagagggtatcgtggtgttaaaccacttctctatgtagaccagtatggttgtgattatactggtagtcttgcagatggcttagaggcttatgctgataagacattgcaagaaatgaaggcattatttcctacttggagtcaggaactcccttttgatgtaattgtggcatggcatgttgtgcgtgatccacgttatgttatgagattgcagagtgctgctactatatgtagtgttgcatatgttgctaatcctactgaagacttgtgtgatggttctgttgttataaaagaacctgtgcatgtttatgcagatgactctattattttacgtcaatataatttatttgacattatgagtcatttttatatggaggcagatacagttgtaaatgctttttatggtgttgctttgaaagattgtggttttgttatgcagtttggttacattgattgcgaacaagacttgtgtgattttaaaggttggattcctggtaacatgatagatggttttgcttgcaccacttgtggtcatgtttatgaagtaggtgatttgatagcacaatcttcaggtgttttgcctgttaaccctgtattgcatactaagagtgcagcaggttatggtggttttggttgtaaagattcttttactctgtatggccaaactgtagtttattttggaggttgtgtgtattggagtccagcacgtaatatatggattcctatattaaaatcctctgttaagtcatatgacagtttggtttatactggagttttaggttgcaaggctattgtaaaggaaacaaatctcatttgcaaagctctgtaccttgattatgttcaacacaagtgtggcaatttacaccaacgggagttgctaggtgtttcagatgtgtggcataaacaattgctaataaatagaggtgtttataaacctctgttagagaatattgattattttaatatgcgacgcgctaaatttagtttagaaacttttactgtttgtgcagatggctttatgccttttcttttagatgatttagttccacgcgcatattatttggcagtaagtggtcaagcattttgtgattatgcagataaactttgccatgctgttgtgtctaagagtaaagagttacttgatgtgtctctggattctttaggtgcagctatacattatttgaattctaagattgttgatttggctcaacattttagtgattttggaacaagttttgtttctaaaattgttcatttctttaagacttttactactagcactgctcttgcatttgcatgggttttatttcatgttttgcatggtgcttatatagtagtggagagtgatatatattttgttaaaaacattcctcgttatgctagtgctgttgcacaagcatttcagagtgttgctaaagttgtactggactctttaagagttacttttattgatggcctttcttgttttaagattggacgtagaagaatttgtctttcaggcagaaaaatttatgaagttgcgcgtggcttgttacattcatcccaattgccattagatgtttatgatttaaccatgcctagtcaagttcagaaagccaagcaaaaacctatctatttaaaaggttctggttctgatttttcattagcggatagtgtagttgaagttgttacaacttcacttacaccatgtggctattctgaaccacctaaagttgcagataaaatttgcattgtggataatgtttatatggccaaggctggtgataaatattaccctgtcgtggttgatgatcatgttggacttttggatcaagcatggagagttccttgtgctggacggcgtgttacatttaaggaacagcctacagtaaaggagattataagcatgcctaagattattaaggttttttatgagcttgacaatgattttaatactattttaaatactgcgtgtggagtgtttgaagtggatgatactgtcgatatggaggaattttatgctgtggtgattgatgccatagaagagaaactttctccatgtaaggagcttgaaggtgtaggtgctaaagttagtgcctttttacagaaattagaggataatcccctatttttatttgatgaggctggcgaagaagtttttgctcctaaattgtattgtgcctttacagctcctgaagatgatgactttcttgaggaaagtgatgttgaagaagatgatgtagaaggtgaggaaactgatttaactatcacaagtgctggacggccttgtgttgctagtgaacaggaggaatcttctgaagtcttagaggacactttggatgatggtccaagtgtggagacatctgattcacaagttgaagaagatgtagaaatgtcggattttgttgatcttgaatctgtgattcaggattatgaaaatgtttgttttgagttttatactacagagccagaatttgttaaagttttgggtctgtatgtgcctaaagcaactcgcaacaattgctggttgcgatcagttttggcagtgatgcagaaattgccctgtcaatttaaagataaaaatttgcaggatctttgggtgttatacaagcaacagtatagtcagttgtttgttgataccttggttaataagatacctgctaatattgtacttccacaaggtggttatgttgctgattttgcatattggtttttaaccttatgtgattggcagtgtgttgcatactggaaatgcattaaatgtgatttagctcttaagcttaaaggcttggatgctatgttcttttatggtgatgttgtctcacatatatgcaagtgtggtgagtctatggtacttattgatgttgatgtgccatttacagtccactttgctcttaaagataagttgttttgtgcatttattactaagcgtattgtgtataaagcagcttgtgttgtggatgttaatgatagtcattctatggctgttgttgatggtaaacaaattgatgatcatcgtatcactagtattactagtgataagtttgattttattattgggcatggtatgtcattttcaatgactacttttgaaattgcccaattgtatggttcttgtataacacctaatgtgtgttttgttaaaggtgatataattaaagtgtctaagcttgttaaagcagaagttgttgtaaaccctgctaatggccatatggtacatggtggtggtgttgcaaaagctattgcagtagcagctggacagcagtttgttaaagagactaccaatatggttaagtctaaaggagtttgtgctactggagattgttatgtctctacagggggcaaattatgtaaaactgtgcttaatgttgttggacctgatgcgagaacacagggtaaacaaagttatgtattgttagagcgtgtttataaacattttaacaactatgactgtgttgttacaactttgatctcagctggtatatttagtgtgccttctgatgtgtctttaacatatctacttggtactgctaagaaacaagttgttcttgttagcaataatcaagaggattttgatcttatttctaagtgtcagataactgctgttgagggcactaagaaattggcagcgcgtctttcctttaatgttggacgttccattgtttacgaaacagatgctaataagttgattttaatcaatgatgttgcatttgtttcgacatttaatgttttacaggatgttttatccttaagacatgatatagcacttgatgatgatgcacgaacctttgttcagagcaatgttgatgttctacctgagggttggcgtgttgtcaataagttttatcaaattaatggtgttagaaccgttaagtattttgagtgtactggaggcatagatatatgcagccaggataaagtttttggttatgtacagcagggtatttttaataaggctactgttgctcaaattaaagccttgtttttggataaagtggacatcttgctaactgttgatggtgttaatttcactaataggtttgtgcctgttggtgaaagttttggtaagagtctaggaaatgtgttttgtgatggagttaatgtcacgaagcataagtgtgatataaattataaaggtaaagtctttttccagtttgataatctttctagtgaagatttaaaggctgtaagaagttcctttaattttgatcagaaggaattgcttgcctattacaacatgcttgttaattgttttaagtggcaggttgttgttaatggtaagtatttcacttttaagcaagctaataacaattgttttgttaatgtttcttgcttaatgctccagagcttgcatctgacatttaaaattgttcaatggcaagaggcatggcttgaatttcgttctggccgccctgctagatttgtagctttggttttggccaaaggtgggtttaaatttggagatcctgctgattctagagatttcttgcgtgttgtgtttagtcaagttgatttgactggggcaatatgtgattttgaaattgcatgtaaatgtggtgtaaagcaggaacagcgtactggtctagatgctgttatgcattttggtacattgagtcgtgaagatcttgagattggttataccgtggactgttcttgcggtaaaaagctaattcattgtgtacgatttgatgtaccatttttaatttgcagtaatacacctgctagtgtaaaattacctaagggtgtaggaagtgcaaatatttttataggtgataatgttggtcattatgttcatgttaagtgtgaacaatcttatcagctttatgatgcttctaatgttaagaaggttacagatgttactggcaaattgtcagattgtctgtatcttaaaaatttgaaacaaacttttaaatctgtgttaaccacctattattnnnnnnnnnnnnngaaaattgagtataaacctgacttgtcacaatactattgnnnnnnnnnnnnnnnnnnnnnnnnnnnnnnnattaaagcccaatttaaaacattcgagaaagtagatggtgtgtatactaattttaaattgataggacacaccgtctgtgacagtcttaattctaagttgggttttgatagctctaaagagtttgttgaatataagattactgagtggccaacagctacaggtgatgtggtgttggctaatgatgatttgtatgttaagagatatgagaggggttgtattacttttggtaaacctgttatatggttaagccatgagaaagcttctctcaattctttaacatattttaatagacctttattggttgatgataataaatttgatgttttaaaagtggatgatgttgatgatagtggtgacagctcagagagtggtgccaaagaaaccaaagaaatcaacattattaagttaagtggtgttaaaaaaccatttaaggttgaagatagtgtcattgttaacgatgatactagtgaaaccaaatacgttaagagtttgtctattgttgatgtgtatgatatgtggcttacaggttgtaagtatgttgttagaactgctaatgctttgagcagagcagttaacgtacctacaatacgtaagtttataaaatttggtatgactcttgttagtataccaattgatttgttaaatttaagagagattaagcctgctgttaatgtggttaaagctgtgcgaaataaaacttctgcatgctttaattttattaaatggctttttgtcttattatttggctggattaaaatatccgctgataataaagnaatctacaccacagaaattgcatcaaagcttacgtgtaagcttgtagctttagcttttaaaaatgcatttttgacatttaagtggagtatggttgctagaggtgcttgcattatagcgactatatttctattgtggtttaattttatatatgccaatgtaatttttagtgatttttatttgcctaaaatcggtttcttgccgacttttgttggtaagattgcacagtggattaagaacacttttagtcttgtaactatttgtgatctatattccattcaggatgtgggttttaagaatcagtattgtaatggaagtattgcatgtcagttctgcttggcaggatttgatatgttagataattataaagccattgatgtagtacagtatgaagctgataggagagcatttgttgattatacaggtgtgttaaagattgtcattgaattgatagtaagttatgccctgtatacggcatggttttatccattgtttgcccttatcagtattcagattttgaccacttggctgcctgagctttttatgcttagtacattacattggagttttaggttgttggtggctttagctaatatgttaccagcacatgtgtttatgaggttttatattattattgcctcttttattaagctctttagcttgtttaagcatgttgcttatggttgtagtaaatctggttgtttgttttgttacaagaggaatcgtagtctacgtgttaaatgtagtactatcgttggtggcatgatacgctattacgatgttatggctaatggtggcactggcttttgttcaaaacatcaatggaattgcattgattgtgattcttataaaccaggtaatacttttattactgttgaggccgctcttgatctatctaaggaattgaaacggcccattcagcctacagatgttgcttatcacacggttactgatgttaagcaagttggttgttctatgcgcttgttctatgatcgtgatggacagcgcatatatgatgatgttaatgctagtttgtttgtggattntagtaatttgctacattctaaggttaagagtgtgcctaatatgcatgttgtggtagtggaaaatgatgctgataaagccaattttctgaatgctgctgtattttatgcacagtctttgtttagacctattttaatggttgataaaaatctgataactactgctaacactggtacgtctgttacagaaactatgtttgatgtttatgtggatacatttttgtctatgtttgatgtggataaaaagagtcttaatgctttaatagcaactgcgcattcttctataaaacagggtacgcagatttataaagttttggatacctttttaagctgtgctcgtaaaagttgttctattgattcagatgttgatactaagtgtttagctgattctgtcatgtctgctgtatcgtcaggtctcgaattgacggatgaaagttgtaataacttggtgccaacatatttgaagagtgacaacattgtagcagctgatttaggtgttctgattcaaaattctgcaaagcatgtgcagggtaatgttgctaaaatagctggtgtttcctgtatatggtctgtggatgcttttaatcagtttagttctgatttccagcataaattgaagaaagcatgttgtaaaactggtttgaaactgaagcttacttataataagcagatggctaatgtctctgttttaactacaccctttagtcttaaagggggtgcagtttttagttattttgtttatgtgtgttttgtgttgagtttggtctgttttattggactgtggtgcttaatgcccacttacacagtacacaaatcagattttcagcttcctgtttatgccagttataaagttttagataatggtgttattagagatgttagcgttgaagatgtttgtttcgctaacaaatttgagcaatttgatcaatggtatgagtctacatttggtctaagttattatagtaacagtatggcttgtcccattgttgttgctgtaatagatcaggattttggctctacagtgtttaatgtccctaccaaagtgttacgatatggttatcatgtgttgcactttattacacatgcactttctgctgatggagtgcagtgttatactccacatagtcaaatatcgtattctaatttttatgctagtggctgtgtgctttcctctgcttgcactatgtttacaatggccgatggtagtccacaaccttattgttatacagatgggcttatgcaaaatgcttctctgtatagttcattggtacctcacgtgcggtataatcttgctaatgctaaaggttttatccgttttccagaagtgttgcgagaagggcttgtacgtgtcgtgcgtactcgttctatgtcgtattgcagagttggattatgtgaggaagctgatgagggtatatgctttaattttaatggttcttgggtgcttaataatgattattatagatcattgcctgggaccttttgtggtagagatgtttttgatttaatttatcagctatttaaaggtttagcacagcctgtggattttttggcattgactgctagttccattgctggtgctatactcgctgtaattgttgttttggtgttttattacctaataaagcttaaacgtgcttttggtgattacaccagtgttgtttttgttaatgtgattgtgtggtgtgtaaattttatgatgctttttgtgtttcaagtttaccccacactttcttgtgtatatgctatttgttatttttatgccacgctttatttcccttcggagataagtgtgataatgcacttacaatggctagttatgtatggcactattatgcctttatggttttgtttgctatatatagctgttgttgtttcaaatcatgctttttgggtattttcttactgcagaaagcttggtacttctgttcgtagtgatggtacatttgaagaaatggctctcactacttttatgattacaaaagattcttattgtaagcttaagaattctttgtctgatgttgcttttaatnnnnnnnnnnnnnngtataataaatataggtattacagcggtaaaatggacactgctgcatatagggaggctgcttgctctcagttggctaaagcaatggacacatttaccaataataatggtagtgatgtgctttaccaaccgcctactgcttccgtttcaacttcattcttgcaatccggtattgtgaaaatggtaaatcctacttctaaggtagaaccatgtgttgtcagtgttacctatggtaatatgacattgaatggtttatggttggatgacaaggtctactgtcccagacatgtaatatgttctgcttcagatatgactaatccagattatacaaatttgttgtgtagagtaacatcaagtgattttactgtattgtttgatcgtttaagccttacagtgatgtcttatcaaatgcggggttgtatgcttgttcttacagtgaccctgcaaaattctcgtacgccaaaatatacatttggtgtggttaaacctggtgatacttttactgttttagctgcttataacggcaaaccacaaggagcctttcatgtaactatgcgtagtagttataccattaagggttcctttttatgcggatcttgtggatctgttggttatgtaataatgggtgattgtgttaaatttgtttatatgcatcaattggagcttagtactggttgtcatactggtactgacttcaatggggatttttatggtccttataaggatgctcaggttgttcagttgcccattcaggattatatacaatctgttaattttttagcatggctttatgctgctatacttaacaattgtaattggtttatacaaagtgataagnnnnctgtagaagattttaatgtgtgggctctgtccaatggatttagccaagttaaatctgaccttgttatagatgctttagcttctatgactggtgtgtctttggaaacactgttggctgctattaagcgtcttaagaatggtttccaaggacgtcagattatgggtagttgctcttttgaggatgaattgacacctagcgatgtttatcaacaactcgctggtatcaagttacaatcaaaacgcactagattgtttaaaggtactgtttgttggattatggcttctacatttttgtttagttgcataattacagcatttgtgaaatggactatgttcatgtatgtaactactaatatgtttagtattacgttttgtgcactttgtgttataagtttggccatgttgttggttaagcannnnnnnnnnnnnnnnnnnatgtatataacacctgtgctttttacattgttgtataacaactatttggttgtgtacaagcatacatttagaggctatgtttatgcatggctatcgtattatgttccatcagttgagtacacttatactgatgaagttatttatggcatgttattgcttgtaggaatggtctttgttacattacgtagcattaaccatgatttgttttcttttataatgtttgttggtcgtttgatttctgttttctctttgtggtacaagggttctaacttagaggaagaaattcttcttatgttggcttccctttttggtacttacacatggacaacagttttatctatggctgtagcaaaggttattgctaagtgggttgctgtgaatgtcttgtatttcacagatatacctcaaattaagatagtgcttttgtgctatttgtttattggttatattattagctgttattggggtttgttttccttgatgaacagtttgtttagaatgcctttgggtgtttataattataaaatttcagtacaggaattaagatatatgaatgctaatggattgcgccctcctaagaatagttttgaagcccttatgcttaattttaagctgttgggtattggaggtgttccaatcattgaagtatctcaatttcaatcaaaattgactgatgtcaaatgtgctaatgtcgtcttgcttaattgcttgcaacatttgcatgttgcttctaattctaagttgtggcattattgtagcactttgcacaatgaaatacttgccacttcggatctgagtgttgcttttgaaaagcttgctcagttattaattgttttgtttgctaatccagctgctgtggatagcaagtgcctgactagtattgaaggagtttgcgatgattacgcaaaggacaatactgttttgcaggctttacagagtgaatttgttaatatggctagcttcgttgaatatgaagttgctaagaaaaatcttgatgaggcgcgttttagtggttctgctaatcaacagcagttaaaacagctagagaaagcctgtaatattgctaaatctgcttatgaacgcgaccgtgctgtagcaaaaaagttggagcgtatggctgatttagctcttactaatatgtataaagaagctagaattaatgataagaagagtaaggttgtttctgccttgcaaactatgctttttagtatggtgcgtaagttagataatcaagctctgaattcaatattagataacgctgtgaagggttgtgtaccattgaatgcaataccttcattggcagcaaatactctgaatataattgtaccagataaaagtgtttatgaccagatagttgataatatctatgttacctatgctggtaatgtatggcagattcaaactatccaggattcagatggtacaaataagcagttgaatgagatatctgatgattgtaactggccactagttattattgcaaatcggtataatgaggtacctgctactgttttgcaaaataatgaattaatgcctgctaagttgaaaattcaggttgttaatagtggtccagatcagacttgtaatacacctactcaatgttactataataatagtaacaatggtaagattgtttatgctatnnnnnnnnnnnnnnnnngtcttaagtatacaaaaattcttaaagatgatggcaattttgttgttttggagttagatcctccttgtaaatttactgttcaagatgctaaaggtcttaaaattaagtacctttattttgtaaaaggttgtaacacactagcaagaggctgggttgttggtacaatttcttctacagttagattgcaagctggaactgctactgaatatgcttccaactcatctatattgtctttatgtgcgttttctgtagatcctaagaaaacgtatttagattttatacaacaaggaggtacacctattgccaattgtgttaaaatgttgtgtgaccatgctggtaccggtatggccattactgttaaacccgatgctaccactagtcaggattcatatggtggtgcgtctgtttgtatatattgccgcgcacgagttgaacacccagatgttgatgggttgtgcaaattacgcggcaagtttgtacaagtgcctgtaggtataaaagatcctgtgtcttatgttttgacacatgatgtttgtcgagtttgtggattttggcgggatggaagttgttcatgtgttagcactgacactactgttcaatcaaaagatactaattttttaaacgcgttcggggtgcgagtgtagatgcccgtctcgtaccctgcgccagtggtttatctactgatgtacaattaagggcatttgatatttacaatgctagtgttgctggcattggtttacatttaaaagttaattgttgccgttttcagcgtgttgatgagaacggtgataaattagatcagttctttgttgttaagaggacagatctgactatatataatagagagatgaaatgctatgagcgtgtaaaagattgtaagtttgtggctgaacacgatttctttacatttgatgtagaaggtagtcgtgtgccacacattgtacgcaaggatttaacaaagtatactatgttggatctttgctatgcattgcgacattttgatcgcaatgattgcatgctgctttgtgacattctctctatatatgctggttgtgaacaatcctattttactaagaaggattggtatgattttgttgaaaatcctgatattattaatgtgtataaaaagctaggacctatttttaatagagccctagttagcgctactgagtttgcggacaaattggtggaggtaggcttagtaggcgttttaacacttgataatcaagatttaaatggtaaatggtatgattttggtgactatgttattgcagccccaggatgtggtgttgctatagcagattcttattattcttatatcatgcctatgctgaccatgtgtcatgcattggattgtgaattgtatgtgaataatgcttatagactatttgatcttgtacagtatgattttactgattacaagcttgaattgtttaataagtattttaagcactggagtatgccatatcatcctaacacggttgattgtcaggatgatcggtgtattatacattgtgctaattttaacatactttttagtatggttttacctaatacatgttttgggcctcttgttaggcaaatttttgtggatggtgtgccttttgttgtttcaattggctaccattataaagaacttggtattgtgatgaatatggatgtggatacacatcgttatcgcttgtctttaaaagacttgcttttatatgctgctgatccagctttgcatgtagcttctgctagtgcattgtatgatttacgcacttgctgttttagtgttgccgctataacaagcggtgtaaaatttcaaacagttaaacctggtaattttaatcaggatttttatgattttgttttaagtaaaggcctgcttaaagagggtagcccagttgatctgaagcactttttctttacacaggatggtaatgctgctattactgattataattattataagtataatttgcccaccatggtggacattaagcagttgttgtttgttttggaagttgtttataagtattttgagatttatgatggtggttgtataccggcatcacaagtcattgttaataattatgataagagtgctggctatccatttaacaaatttggaaaagccaggctctattatgaagcattatcatttgaggaacaggatgaaatttacgcttatactaagcgtaatgtcctgccaacacttactcaaatgaatttgaaatatgctattagtgctaagaatagagcccgcactgttgctggtgtttccatacttagtactatgactggcagaatgtttcatcaaaaatgtttgaaaagtatagcagctacacgtggtgttcctgtagttataggcaccactaaattttatggtggctgggatgatatgttacgccgccttattaaagatgtcgacaatcctgttcttatgggttgggattatcctaagtgtgatcgtgctatgccaaacatactacgtattgttagtagtttggtattagcccgaaaacatgagacatgttgttcgcaaagcgataggttttatcgacttgcgaatgaatgcgcacaagttttgagtgaaattgttatgtgtggtggctgttattatgttaagcctggtggcactagtagtggtgatgcaactactgcttttgctaattcagtctttaacatatgtcaagctgtttcagccaatgtatgtgccttaatgtcatgcaatggcaataagattgaagatcttagtatacgtgctcttcagaagcgcttatactcacatgtgtatagaagtgataaggttgattcaacctttgtcacagaatattatgaatttttaaataagcattttagtatgatgattttgagtgatgatggggttgtgtgtnnnnnnnnnnnnnnnnnnnnnnnnnnnnnnnnnnnnnnnnnnnnnnnnnnnnnnnnggtattatattatcaaaataacgtttttatgtcagaatccaaatgttgggttgagcatgacataaataatggacctcatgaattttgttcacaacacacaatgcttgtaaagatggatggtgacgatgtctaccttccatatcctaatcctagtcgtatattaggagctggatgttttgtagatgatttgttaaagactgatagtgttcttttaatagaacgatttgtaagtcttgcaatagatgcttatccacttgtgtatcatgaaaatgaagaataccaaaaggtttttcgtgtttatttggcgtatataaagaagttgtacaatgacctgggtaatcagatcttggatagctacagtgttattttaagtacttgtgatggacaaaagttcactgatgaatccttttacaagaacatgtatttaagaagtgcagtcatgcagagtgttggagcttgcgtggtctgctcttctcaaacatcattacgttgtggcagttgcatcagaaagcctcttctttgctgcaagtgttgttatgatcacgttatggcgactgatcataaatatgtcttgagtgtttcaccatatgtgtgtaatgcaccaggatgtgatgtaaatgatgttaccaaattgtatctaggtggtatgtcatattattgtgaagaccataagccacaatattcattcaagttggtaatgaatggtttggtttttggtctatataaacaatcttgtacaggatctccgtacatagacgattttaatcgtatagctagttgtaaatggaccgatgtggatgattacatactagctaatgaatgtacagagcgcttgaaattgtttgctgcagaaacgcaaaaggcaaccgaggaagcctttaagcagagttatgcatcagcaacaatacaagagattgttagtgagcgcgaattgattctctcttgggagattggaaaagttaagccaccacttaataaaaattatgtttttactggctaccattttactaaaaatggtaagacagttttaggtgagtatgtttttgataagagtgagttgactaatggtgtgtactatcgcgccacaaccacttataagctatctgtaggagatgtttttgttttaacctctcattcagtagctaatttaagtgctcctacgcttgttccgcaggagaattatagtagtattagatttgctagtgtttatagtgtgcttgagacgtttcagaacaatgttgttaattatcaacacattggtatgaaacgttactgtaccgtgcaaggacctcctggtacagggaagtcacatcttgctattggtcttgctgtattttattgtacagcacgtgttgtatacacagcggccagccatgcagctgttgacgcattgtgtgaaaaagcatataaatttttgaatataaatgattgcactcgtattgttccggccaaggtcagggtagagtgctatgataagtttaaaattaatgacaccactcgtaagtatgtgtttactaccataaatgcattacctgagatggtgactgatattgttgttgtagatgaagttagcatgcttaccaattatgagctttctgttattaatgctcgtattcgtgctaagcattatgtttatattggtgatcctgctcaattgccagcaccacgtgtgttattgagcaagggtacacttgaacctaaatattttaacactgttactaagctcatgtgttgcttagggccagacatttttcttggtacatgttatagatgtcctaaggaaattgttgatacagtgtccgccttggtttatgaaaataagcttaaggctaagaatgagagtagttcattgtgttttaaggtctattataagggcgttacaacacatgaaagttctagtgctgtaaatatgcagcagatttatttgattaataagtttttgaaggctaaccctttgtggcataaagctgtttttattagcccatataatagtcagaactttgcagctaagcgtgttttgggtttacaaacccaaaccgtggattctgctcaaggttctgaatacgattatgttatatattcacagactgcagaaacagcgcattctgtaaatgttaatcgcttcaatgttgccattactcgagccaagaaaggtattctttgtgttatgagtaatatgcagttgtttgaagcattacagtttactacattgaccttagataaagtgccacaggccgttgaaactaaagttcaatgtagtactaatttatttaaagattgtagcaagagttatagcggttaccacccagctcatgctccttcatttttggcagtagatgacaaatataaggcaactggcgatttagccgtgtgtcttggcattagtgattctgctgttacatattcaagattaatatcactcatgggttttaaattggatgttacccttgatgggtattgtaagctttttataactaaagaagaagctgttaaacgcgtgcgtgcctgggttggctttgatgctgaaggtgctcatgccacgcttgatagcattgggacaaatttcccactccaattaggattttccacaggaattgattttgttgtggaagccactggtttgtttgctgatagagatggttacagctttaaaaaggctgtggcgaaagctcctcctggtgaacaatttaagcacctcatccctttgatgacgagaggtcatcgctgggatgttgttagacctagaatagtacaaatgtttgcagatcatttaattgatctgtctgattgtgttgtgctagttacatgggcagccaactttgagctcacttgtctccgctactttgcaaaagtaggtcgtgagatttcttgtaatgtatgcactaaacgtgctacagtttacaattctagaactggttactatggttgttggcgccatagtgttacatgtgattacttgtataatccacttattgttgatattcaacagtggggatatattggttctttatcaagtaatcangatttatattgtagtgtccataaaggagcacatgttgcttcctctgatgctataatgacacggtgtttggccgtttatgattgcttttgcaataatattaattggaatgtggagtatcccatcatttcaaatgagttaagtattaatacctcttgtagagtcttgcagcgtgtgattcttaaagctgccatgctctgcaacagatatactttgtgttatgatattggcaacccaaaagggattgcctgtgtcaaagattttgattttaagttctatgatgcccaaccaattgttaagtctgttaagactcttttgtattcttttgaggcacataaggactcttttaaagacggtttgtgtatgttttggaactgtaatgtggataagtatccaccgaatgcagttgtatgtagatttgacactagagtgttgaataatttaaatcttcctggctgtaatggaggtagtttgtatgttaataaacatgcattccacactaaaccctttgctagggcagcctttgagcatttgaagcctatgccattcttctattattcagatacgccttgtgtgtatatggatggtatggatgctaagcaggttgattatgtacctttgaaatctgccacgtgcatcacaagatgcaatttaggtggtgcagtttgtttaaaacatgctgaagagtatcgtgagtacttagagtcttacaatacagctactacagcaggttttactttttgggtctataagacatttgatttttataatttgtggaatacgttcaccaagctacaaagcttggagaatgttgtatataatttagtcaagactggtcattatacaggacaggctggtgaaatgccttgtgccattataaatgataaagttgtgactaagatcgataaggaggatgttgtcatttttattaataatacaacataccctactaatgtggctgttgaattatttgccaagcgcagtgttcgacaccacccagagcttaagctctttagaaatttaaatatagacgtgtgttggaagcacgtcatttgggattatgctagagaaagtatattttgcagtaatacctatggtgtctgcatgtatacagatttaaagttcattgataaattgaatgtcctttttgatggtcgtgataatggtgcttttgaagcttttaaacgctctaataatggcgtttacatttccacgacaaaagttaagagtctttcgatgataagaggtccaccgcgtgctgaattaaatggcgtggtggtggacaaggttggagacactgattgtgtgttttattttgctgtgcgtaaagaaggtcaggatgtcatcttcagccaattcgacagcctgggagtcagctctaaccagagcccacaaggtaatctggggagtaatggtaaacccggtaatgtcggtggtaatgatgctctgtcaacctcaactatctttacacaaagccgtgttattagctcttttacatgtcgtactgatatggaaaaagattttatagctttagatcaagatgtgtttattcagaagtatggtttggaggactatgcctttgaacacattgtttatggtaatttcaaccagaagattattggtggtttgcacttgttaataggcttgtaccgaagacagcaaacttccaatctggttgttcaggagtttgtctcatatgactccagcatacactcttattttatcactgacgagaagagtggtggtagtaagagtgtttgcactgttatagacattttattggatgattttgtgactcttgttaagtcacttaatcttaattgtgtgagtaaagttgttaatgttaatgttgattttaaagattttcagtttatgctttggtgtaacgatgagaaagttatgactttctatcctcgtttgcaagctgcatctgactggaagcctggttattctatgcctgtattatataagtatttgaattctccaatggaaagagttagtctctggaattatgggaagccagttactttgcctacaggctgtatgatgaatgttgctaagtatactcagttatgtcaatatctgaatactacaacattagctgtacctgttaatatgcgagttttgcatttaggtgcaggttcagaaaaaggagtagcaccgggttctgcagttcttaggcagtggttgcctgctggtactattcttgtagataatgatttatacccatttgttagtgacagtgtcgctacatattttggggattgtataactttaccctttgattgtcaatgggatttgataatttctgatatgtatgaccctattactaagaacataggtgagtacaatgtgagtaaagatggtttctttacatacatttgtcatatgattcgagacaagttagctcttggtggcagtgttgctataaaaataacagagttttcttggaatgcagaattatataatttaatggggtattttgcattttggactgtgttttgcacaaatgcaaatgcttcttctagtgaaggatttttaattggcataaattatttgtgtaagcccaaggttgagatagatggaaatgttatgcatgccaattatttgttttggagaaattccacagtttggaacgggggtgcttatagcctgtttgacatggctaaattcccgcttaagttggctggtactgccgtaataaatttaagagcagaccagattaatgatatggtttattcccttcttgaaaagggtaaactacttattagagatacaaataaagaagttttcgttggtgacagtttggttaatgtaatctaaactttaaaaatggctgtcgcttatgcagacaagcctaatcattttatcaattttccacttacccattttcagggttttgtgttaaattataaaggtttacaatttcaaattctcgatgaaggagtggattgtaaaatacaaacagcgccacacattagtcttactatgctggatatacagcctgaagactataaaagtgttgatgtcgctattcaagaagttattgatgatatgcattggggtgatggttttcagattaaatttgagaatcctcacatcctaggaacatgcatagttttagatgttaaaggtgtagaagaattgcatgacgatttagttaattacattcgtgataaaggttgtgttgctgaccaatccaggaaatggattggccattgtaccatagctcaactcacggatgcagcactgtccattaaggaaaatgttgattttataaacagcatgcaattcaattataaaatcaccatcaacccctcatcaccagctagacttgaaatagttaagctcggtgctgaaaagaaagatggtttttatgaaaccatagttagtcactggatgggaattcgttttgaatacacatcgcccactgataagctagctatgattatgggttattgttgtttagatgtggtacgtaaagagctagaagaaggcgatcttcccgagaatgatgatgatgcttggtttaagctatcgtaccattatgaaaacaattcttggttcttccgacatgtctacaggaaaagttttcatttccgtaaggcttgtcaaaatttagattgtaattgtttggggttttatgaatcttcagttgaagaatattaaactcagtgaaaatgtttttgctttctagatttattctagttagctgcgtaattggtagcttaggtttttataaccctcctaccaatgttgtttcgcatgtaaatggagattggtttttatttggtgacagtcgttcagattgtaatcatattgttaatatcaacccccataattattcttatatggaccttaatcctgctttatgtgattctggtaaaatatcatctaaagctggcaactccattttcaggagttttcactttaccgatttttataattatacaggcgaaggtcaacaaattattttttatgagggtgttaattttacgccttatcatgcctttaaatgcaaccgttctggtagtaatgatatttggatgcagaataaaggcttgttttatactcaggtttataagaatatggctgtgtatcgcagccttacttttgttaatgtatcatatgtttataatggctccgcacaagctacatctttttgtaaatctggtagtaagcttaagaatttagtccttaataaccctgcttatatagctcctcaagctaaatctgggattattacgaaggttgaagctgatttttatttgtcaggttgtgacgagtatatcgtaccactttgtatttttaacggcaagtctttgtcgaatacaaagtattatgatcatagtcaatattattttaataaagacactggtgttatttatggtctcaattcaacagaaaccattaccactggttttgatcttaattgtcattatttagttttaccctctggtaattatttagccatttcaaatgagctattgttaactgttcctacgaaagcaatctgttttaataagcgtaaggattttacgcctgtacaggttgttgattcgcggtggaacaatgccaggcagtctgataacatgacggcggttgcttgtcaacctccgtactgttattttcgtaattctactaccaactatgttggtgtttatgatattaatcatggagatgctggtttcactagcatactcagtggtttgttatataattcatcttgtttttcgcagcaaggtgtttttaggtatgataatattagcagtgtttggcctctctacccctatggcagatgtcctactgctgcttatattaatatccctgatttacccatttgtgtgtatgatccgctaccagttattttgcttggcattcttttgggcgttgccattgtaattattgtagtttttttgttacattttatggtggataatgttactaggctgcatgatgcttagaccataatctaaacatgtttttgatacttttaatttccttaccaacggcttttgctgttataggagatttaaattgtactttagatcctaggcttaaaggtagctttaataatagagacaccggtcctccttctataagtattgatactgttgatgttactaatggtttgggtacttattatgttttagatcgtgtgtatttaaataccacgttgtttcttaatggttattaccccacttcaggttccacatatcgtaatatggcactgaagggaactgacttattgagcacattatggtttaaaccaccatttctttctgattttattaatggtatttttgctaaggtcaaaaataccaaggtttttaaagatggtgtaatgtatagtgagttccctgctataactataggtagtacttttgtaaatacatcctatagtgtggtagtacaaccacgtacaattaattcaacacaggatggtgttaataaattacaaggtcttttagaggtctctgtttgccagtataatatgtgtgagtacccacatacgatttgtcatcctaacttgggtaaccatttcaaagaactatggcattatgatacaggtgttgtttcctgtttgtataagcgtaatttcacatatgatgtgaatgctacttatttgtattttcatttttatcaagaaggtggtactttttatgcatattttacagacactggttttgttactaagtttttgtttaatgtttatttaggcatggcactttcacactattatgtcatgcctctgacttgtattcgtaggtctaaagacggttttagtccagaatattgggttacacccctcactcctagacaatatttactcgctttcaatcaagatggtattatttttaatgctgttgattgtatgagtgattttatgagtgagattaagtgtaaaacacaatctatagcaccacccactggtgtttatgaattaaacggttacactgttcagccaattgcagatgtttaccgacgcaaacctgatcttcccaattgtaatatagaagcttggcttaatgataagtcggtgccctccccattaaattgggaacgtaagacattttcaaattgtaattttaatatgagcagcctgatgtcttttattcaggcagattcatttacttgtaataatattgatgctgctaagatatatggtatgtgtttttccagcataactatagataagtttgctatacccaatcgcaggaaggttgacctacaattgggtaatttgggctatttgcagtcatccaactatagaattgatactactgcaacaagttgtcagttgtattataatttacctgctgctaatgtctctgttagcaggtttaatccttctacttggaataagagatttggttttatagaagattctgtttttaaacctcaacctgcaggtgttcttaccaatcatgatgtagtttatgcccaacattgttttaaagctcctaaaaatttctgtccgtgtagttcctgttctggtaaaaataatggtataggcacttgtcctgcaggtactaattctttaacttgtgataatttatgtactcttgatcctattacacttaaagctccagatacttataagtgtccccaatctaaatctttagttggtataggtgagcactgttcgggtcttgctgttaaaagtgattattgtggaaacaattcttgtacttgccaaccacaagcatttttgggttggtctgcagactcttgtttacaaggagacaagtgtaatatttttgctaatttcattttgcatgatgttaataatggtcttacttgttccactgatttacaaaaagctaacacagaaatagaacttggtgtttgtgttaattatnacctctatggtatttcaggccaaggcatttttgttgaggttaatgcgacttattataatagttggcagaaccttttatatgattctaatggtaacctctacggttttagagactacataacaaacagaacttttatgattcatagttgctatagcggtcgtgtttctgcggcctatcatgccaattcttccgaaccagcattgctatttcggaatattaaatgcaactacgtttttaataatagtcttacacgacagctgcaacccattaactattcgtttgatagttatcttggttgtgttgtcaatgcttataatagtactgctatttctgtccaaacatgtgatctcacagtaggtagtggttactgtgtggattactttaaaaacagacgaagtcgtagagcgatcaccactggttatcggtttactaattttgagccatttactgttaattcagtaaatgatagtttggaacctgtaggtggtttgtatgaaattcaaataccttcagagtttactataggtaatatggaggagtttattcaaacaagctctcccaaagttactattgattgtgctgcatttgtctgtggtgattatgcagcatgtaaattacagttggttgaatatggtagtttctgtgataacattaatgccatactcacagaagtaaatgaactacttgatactacacagttgcaagtagctaatagtttaatgaatggtgttactcttagcactaagcttaaagatggtgttaatttcaatgtagacgacatcaattttgcccctgtattaggttgtctaggcagcgaatgtagtaaagcttccagtagatctgctatagaggatttactttttgataaagtaaagttatctgatgtcggtttcgttgaggcttataataattgtacaggaggtgccgaaattagggacctcatttgtgtgcaaagttataaaggcatcaaagtgttacctccactgctctcagaaaatcagatcagtggatatactttggctgccacctctgctagtctatttcctccttggacagcagcagcaggtgtaccattttatttaaatgttcagtatcgcattaatgggcttggtgtcaccatggatgtgctaagtcaaaatcaaaagcttattgctaatgcatttaacaatgcccttcatgctattcagcaagggttcgatgcaactaattctgctttagttaaaattcaagctgttgttaatgcaaattctgaagctcttaataacttattgcaacaactctctaatagatttggtgctataagtgcttctttacaagaaattctatctagacttgatgctcttgaagcggaagctcagatagatagacttattaatggtcgtctcaccgctcttaatgcttatgtttctcaacagcttagtgattctacactggtaaaatttagtgcagcacaagctatggagaaggttaatgaatgtgtcaaaagccaatcatctaggataaatttctgtggtaatggtaatcatattatatcattagtgcagaatgctccatatggtttgtattttatccactttaattatgtccctactaagtatgtcacagcgaaggttagtcctggtctgtgcattgctggtaatagaggtatagctcctaagagtggttattttgttaatgtaaataatacttggatgtacactggtagtggttattactaccctgaacctataactgaaaataatgttgttgttatgagtacctgcgctgttaattatactaaagcgccgtatgtaatgctgaacacttcaatacccaaccttcctgattttaaggaagagttggaccaatggttcaaaaatcaaacatcagtggcaccagatttgtcacttgattatataaatgttacattcttggacctacaagttgaaatgaataggttacaggaggcaataaaagttttaaatcatagctacatcaatctcaaggacattggtacatatgaatattatgtaaaatggccttggtatgtatggcttttaatctgccttgctggtgtagctatgcttgttttactattcttcatatgctgttgtacaggatgtgggactagttgttttaagaaatgtggtggttgttgtgatgattatactggataccaggagttagtaatcaaaacttcacatgacgactaagttcgtctttgatttattgcattgatcttttgttagatctttttccaatctagcattctttaccacgcccttttaatggacatttggagacctgagaagaaatttctccgttacattaacggttttaatgtctcagaattagaagatgcttgttttaaatttaactatcaatttcctaaagtaggatattgtagagttcctagtcatgcttggtgccgtaatcaaggtagattttgtgctacattcactctttatggtaaatccaaacattatgataaatattttggagtaataaatggtttcacagcattcgctaatactgtagaggatgctgttaacaaactggttttcttagctgttgactttattacctggcgtagacaggagttaaatgtttatggctgatgcttatcttgcagacactgtgtggtatgtggggcaaataatttttatagttgccatttgtttattggttacaatagttgtagtggcatttttggcaacttttaaattgtgtattcaactttgcggtatgtgtaataccttagtactgtccccttctatttatgtgtttaatagaggtaggcagttttatgagttttacaatgatataaaaccaccagtccttgatgtggatgacgtttaggtaatccaaacattatgagtagtaaacctacaccagcaccagtttatatctggactgctgatgaagctattaaattcctaaaggaatggaatttttctttgggtattatactactttttattacaatcatattgcaatatggatatacaagtcgcagtatgtttgtttatgttattaagatgattattttgtggcttatgtggcccattactataatcttaactactttcaattgcgtatacgcattgaataacgtgtatcttggcctttctatagtttttaccatagtggccattattatgtggattgtgtattttgtgaatagtatcaggttgtttattagaactggaagtttttggagttttaacccagaaacaaacaacttgatgtgtatagatatgaaaggaacaatgtatgttaggccgataattgaggactatcataccctgacggtcacaataatacgcggtcatctttatattcaaggtataaaactaggtattggctattctttggcagatttgccagcttatatgtctgttgctaaggttacacacctgtgcacatataagcgtggttttcttgacaggataagcgatactagtggttttgctgtttatgttaagttcaaagtcggtaattaccgactgccatcaacccaaaagggttctggcatggacaccgcattgttgagaaataatatctaaattttaaggatgtcttttactcctggtaagcaatccagtagtagagcgtcctctggaaatcggtctggtaatggcatcctcaagtgggccgatcagtccgaccagtttagaaattttcaaaccaggggtagaagagctcaacccaagcaaactgctacttctcagcaaccatcaggagggaatgttgtaccccactattcttggttctctggaattactcagtttcaaaagggaaaggagtttgagtttgcagaaggacaaggtgtgcctattgcaccaggagtcccagctactgaagctaaggggtactggtacagacacaacagacgttcttttaaaacagccgatggcaaccagcgtcaactgctgccacgatggtatttttactatctgggaaccggaccgcatgctaaagaccagtatggcaccgatattaacggagtctactgggtcgctagcaaccaggctgatgtcaataccccggctgacattgtcgatcgggacccaagtagcgatgaggctattccgactaggtttccgcctggcacggtactccctcagggttactatattgaaggctcaggaaggtctgctcctaattccagatctacttcgcgcacatccagcagagcctctagtgcaggatcgcgtagtagagccaattctggcaatagaacccctacctctggtgtaacacctgacatggctgatcaaattgctagtcttgttctggcaaaacttggcaaggatgccaccaaacctcagcaagtaactaagcatactgccaaagaagtcagacagaaaattttgaataaaccccgccagaagaggagccccaataaacaatgcactgttcagcagtgttttggtaagagaggccctaatcagaattttggtggtggagaaatgttaaaacttggaactagtgacccacagttccccattcttgcagaactcgcacccacagctggtgcgtttttctttggatcaaaattagagttggccaaagtgcagaatttatctgggaatcctgatgagcctcagaaggatgtttatgaattgcgctataacggcgcaattaggtttgacagtacactttcaggctttgagaccataatgaaggtgctgagtgagaatttgaatgcctatcaacaacaagatggtatgatgaatatgagtccaaaaccacagcgtcagcgtggtcataagaatggacaaggagaaaatgataatataagtgttgcagtgcccaaaagccgcgtgcagcaaaataagagtatagagttgactgcagaggacatcagccttcttaagaagatggatgagccctttactgaagacacctcagaaatataagagaatgaaccttatgtcggcatctggtggtaacccctcgcagaaaagtcgagataaggcactctctatcagaatggatgtcttgctgctataatagatagagaaggttatagcagactatatattaattagttgaaagttttgtgttgtaatgtatagtgttggagaaagtgaaagacttgcggaagtaattgccgacaagtgccaaagggaagagccagcatgttaagttactacccagtaattagtaaatgaatgaagttaattatggccaattggaag

SEQ ID NO: 8 - DNA, 27484 bp, Artificial Sequence
  Human coronavirus NL63 strain
  misc_feature (4427)..(4427): n is a, c, g, or t
  misc_feature (5375)..(5375): n is a, c, g, or t
  misc_feature (7111)..(7134): n is a, c, g, or t
  misc_feature (7693)..(7695): n is a, c, g, or t
  misc_feature (13805)..(13805): n is a, c, g, or t
  misc_feature (16690)..(16694): n is a, c, g, or t
  misc_feature (18474)..(18510): n is a, c, g, or t
  misc_feature (21491)..(21491): n is a, c, g, or t
  misc_feature (21494)..(21494): n is a, c, g, or t
  misc_feature (22264)..(22340): n is a, c, g, or t
  misc_feature (24779)..(24797): n is a, c, g, or t
actttgtgtctactcttctcaactaaacgaaatttttctagtgctgtcatttgttatggcagtcctagtgtaattgaaatttcgtttagtttgtaaactggttaggcaagtgttgtattttctgtgtctaagcactggtgattctgttcactagtgcatacactgatatttaagtggtgttccgtcactgcttattgtggaagcaacgttctgtcgttgtggaaaccaataactgctaaccatgttttacaatcaagtgacacttgctgttgcaagtgattcggaaatttcaggttttggttttgccattccttctgtagccgttcgcacttatagcgaagccgctgcacaaggttttcaggcatgccgttttgttgcttttggcttacaggattgtgtaaccggtattaatgatgatgattatgtcattgcattgactggtactaatcaactctgtgccaaaattttacctttttctgatagaccccttaatttgcgaggttggctcattttttctaacagcaattatgttcttcaggactttgatgttgtttttggccatggtgcaggaagtgtggtttttgtggataagtatatgtgtggttttgatggtaaacctgtgttacctaaaaacatgtgggaatttagggattactttgataataatactgatagtattgttattgatggtgtcacttatcaactagcatgggatgttatacgtaaagacctttcttatgaacagcaaaatgttttagccattgagagcattcattaccttggtactacaggtcatactttgaagtccggttgcaaacttattaatgccaagccgcctaaatattcttctaaggttgttttgagtggtgaatggaatgctgtgtatagggcatttggttcaccatttattacaaatggtatgtcattgctagatataattgttaaaccagttttctttaatgcttttgttaaatgcaattgtggttctgagagttggagtgttggtgcatgggatggttacttatcttcttgttgtggcacacctgctaagaaactttgtgttgttcctggtaatgttgttcctggtgatgtgatcatcacctcaactggtgctggttgtggtgttaaatactatgctggcttagttgttaaacatattactaacattactggtgtgtctttatggcgtgttacagctgttcattctgatggaatgtttgtggcatcatcttcttatgatgcactcttgcatagaaattcattagaccctttttgctttgatgttaacactttactttctaatcaattacgtctagcttttcttggtgcttctgttacagaagatgttaaatttgctgctagcactggtgttattgacattagtgctggtatgtttggtctttatgatgacatattgacaaacaacaaaccttggtttgtacgcaaagcttctgggctttttgatgcaatctgggatgcttttgttgccgctattaagcttgtaccaactactactggtgttttggttaggtttgttaagtctattgcttcaactgttttaactgtctctaatggtgttattattatgtgtgcagatgttccagatgcttttcaatcagtttatcgcacatttacacaagctatttgtgctgcatttgatttttctttagatgtatttaaaattggtgatgttaaatttaaacgacttggtgattatgttcttactgaaaacgctcttgttcgtttgactactgaagttgttcgtggtgttcgtgatgctcgcataaagaaagccatgtttactaaagtagttgtaggtcctacaactgaagttaagttttctgttattgaacttgccactgttaatttgcgtcttgttgattgtgcacctgtagtttgccctaaaggtaagattgttgttattgctggacaagcttttttctatagtggtggtttttatcgttttatggttgatcctacaactgtattaaatgatcctgtttttactggtgatttattttacactattaagtttagtggttttaagcttgatggttttaaccatcagtttgttactgctagttctgctactgatgctattattgctgttgagctgttgttattggattttaaaactgcagtttttgtgtacacatgtgtggttgatggctgtagtgtcattgttagacgtgatgctacattcgctacacatgtgtgttttaaggactgttataatatttgggagcaattctgcattgataattgtggtgagccatggtttttgactgattataatgctatcttgcagagtaataaccctcaatgtgctattgttcaagcattggagtctaaagttttgcttgagaggtttttacctaagtgtcctgaaatactgttgagtattgatgatggccatttatggaatctttttgttgaaaagtttaattttgttacagattggttaaaaactcttaagcttacacttacttctaatggtcttttaggtaattgtgccaaacgttttagacgtgttttggtaaaattgcttgatgtctataatggttttcttgaaactgtctgtagtgtcgcatacactgctggtgtttgcatcaaatattatgctgttaatgttccatatgtagttattagtggttttgtaagtcgtgtaattcgtagagaaaggtgtgacatgacttttccttgtgttagttgtgtcacctttttctatgaatttttagacacttgttttggtgttagtaaacctaatgccattgatgttgaacatttagagcttaaagaaaccgtttttgttgaacctaaggatggtggtcaattttttgtttctggtgattatctttggtatgttgtagatgacatttattatccagcttcatgtaatggtgtattgccagttgcttttacaaaattagcaggtggtaaaatatctttttctgatgatgttatagttcatgatgttgaacctacccataaagtcaagctcatatttgagtttgaagatgatgttgttaccagtctttgtaagaagagttttggtaagtccattatttatacaggtgattgggaaggtctacatgaagttcttacatctgcaatgaatgtcattgggcaacatattgagttgccacaattttatatttatgatgaagagggtggttatgatgtttctaaaccagttatgatttcacaatggcctattagtaatgatagtaatggttgtgttgttgaagcgagcactgattttcatcaattagaatgtattgttgatgattctgttagagaagaggttgatataattgaacaaccttttgaagaagttgaacatgtgctctcaattagacaacctttttctttttcttttagagatgaattgggtgttcgtgttttagatcaatctgataataattgttggattagtaccacacttgtacagttgcaacttacaaagcttttggatgattctattgagatgcaattgtttaaagttggtaaagttgattcaattgtccaaaagtgttatgagttgtctcatttaattagtggttcacttggtgatagtggtaaacttcttagtgaacttcttaaagaaaaatatacatgttctataacttttgagatgtcttgtgattgtggtaaaaagtttgatgagcaggttggttgtttgttttggattatgccttacacaaaactttttcaaaaaggtgagtgttatatttgtcataaaatgcagacttataagcttgttagtatgaaaggtactggtgtgtttgtacaggacccagcacctattgacattgatgctttccctgtgaaacctatatgttcatctgtatatttaggtgttaagggttctggtcattatcaaacaaatttatacagttttaataaagctattgatggttttggtgtctttgacattaaaaatagtagtgttaatactgtttgttttgtcgatgttgattttcatagtgtagaagtagaagctggtgaagttaaaccttttgctgtatataaaaatgttaaattttatttaggtgacatttcacaccttataaactgtgtttcttttgactttgttgtcaatgctgctaatgagaatcttatgcatggaggcggtgttgcacgtgctattgatattttgactgaaggtcaacttcagtcattatctaaagattacattagtagtaatggtccacttaaggtaggaacaggtgttatgttggagtgtgaaaaattcaatgtatttaatgttgttggtccgcgagctggtaaacatgagcattcattacttgttgaagcttataattctatcttagttgaaaatggtattccacttatgcctcttcttagttgtggtatttttggtgtaaggattgaaaattctcttaaagctttgtttagttgtgacnttaataaattattgcaagtttttgtttattcttcaaatgaagaacaagctgttcttaagtttttagatggtttagatttaacaccagtcattgatgatgttgatgttgttaaaccttttagagttgaaggtaatttttcattctttgattgtggtgtcaatgccttggatggtgatatttacttattattcactaactctattttaatgttggataaacaaggacaattattggatacaaaacttaatggtattttgcaacaggcagctcttgattatcttgctacagttaaaactgtaccagctggtaatttggttaaacttgttgttgagagttgtaccatttatatgtgtgttgtaccatcgataaatgatctttcttttgataaaaatcttggtcgttgtgtgcgtaaacttaatagattgaaaacttgtgttattgccaatgttcctgctattgatgttttgaaaaagcttctttcaagtttgactttaactgttaaatttgttgtagagagtaatgttatggatgttaacgactgttttaagaatgataatgtagttttgaaaattactgaagatggtattaatgttaaagatgttgttgttgagtcttctaagtcacttggtaaacaattgggtgttgtgagtgatggtgttgactcttttgaaggtgttttgcctattaatactgatactgtcctatctgtagctccagaagttgactgggttgctttttatggttttgaaaaggcagcactttttgcttctttggatgtaaagccatatggttaccctaatgattttgttggtggttttagagttcttgggaccaccgacaataattgttgggttaatgcaacttgtataattttacagtatcttaagcctacttttaaatctgagggtttaaatgttctttggaacaaatttgttacaggtgatgttngaccttttgttagttttatttattttataactatgtcttcaaagggtcaaaagggtgatgctgaagaggcattatctaaattgtcagagtatttgattagtgattctattgttactcttgaacaatattcaacttgtgacatttgtaaaagtactgtagttgaagttaaaagtgctgttgtttgtgctagtgtgcttaaagatggttgtgatgttggtttttgtccacacagacataaattgcgttcacgtgttaagtttgttaatggacgtgttgttattaccaatgttggtgaacctataatttcacaaccttctaagttgcttaatggtattgcttatacaacattttcaggttcttttgataacggtcactatgtagtttatgatgctgctaataatgctgtctatgatggtgctcgtttgtttgcttcagatttgtctactttagctgttacagctattgttgtagtaggtggttgtgtaacatctaatgtttcaccaattgttagtgagaaaatttctgttatggataaacttgatactggtgcacaaaaatttttccagtttggtgattttgttatgaataacattgttctgtttttaacttggttgcttagtatgtttagtcttttacgtacttctattatgaagcgtgatattaaagttattgccaaggctcctaaacgtacaggtgttattttgacacgtagttttaagtataacattaaatctgctttgtttgttgtaaaacagaagtggtgtgttattgttactttgtttaagttcttattgttattatatgctatttatgcacttgtttttatgattgtgcaatttagtccttttaatagtcttttatgtggtgacattgtaagtggttatgaaaaatccacttttaataaggatatttattgtggtaattctatggtttgtaagatgtgtttgtttaggtatcaagagtttaatgatttggatcatactagtcttgtttggaagcacattcgtgatcctatattaatcagtttacaaccatttgttatacttgttattttgttaatttttggtaatatgtatttgcgttttggacttttatattttgttgcacaatttattagtacttttggttctttcttaggctttcatcagaaacagtggtttttacattttgtgccgttcgatgttttatgtaatgagtttttagctacatttattgtctgcaaaattgttttatttgttagacatattattgttggctgtaataatgctgactgtgtagcttgttctaaaagtgctagacttaaacgtgtaccacttcaaactattattaatggtatgcataaatcattctatgttaatgctaatggtggtacttgtttctgtagtaaacataacttcttttgtgttaattgtgattcttttgggcctggtaatacttttattaatggtgatattgcaagagagcttggtaatgttgttaaaacagctgttcaacccacagctcctgcatatgttattattgataaggtagattttgttaatggattttatcgtctttatagtggtgacactttttggcgttatgactttgacattactgaatctaagtatagttgtaaagaggttctgaagaattgtaatgttttagaaaattttattgtttacaataatagtggtagtaacgttacacagattaaaaatgcttgtgtttatttttctcaattgttgtgtgaaccnnnnnnnnnnnnnnnnnnnnnnnngttgtcaactttatcagttgattttaatggtgttttgcataaggcatatgttgatgttttgtgtaatagtttttttaaagagctaactgctaacatgtccatggctgaatgtaaagctacacttggtttgactgtttctgatgatgattttgtttcagctgtcgccaatgcacataggtatgacgttttgctttcagatttgtcatttaataatttttttatttcttatgctaaacctgaagataagttgtccgtttatgacattgcttgttgtatgcgtgccagttctaaggttgttaaccataatgttttaatcaaagagtcaatacctattgtttggggtgtcaaggactttaatactctttctcaagagggtaagaagtaccttgttaaaacaactaaagcaaagggtttgacttttctattaacttttaatgacaaccaagcaattacacaagttcctgctactagtatagttgcaaaacagggtgctggttttaaacgtacttataattttctatggtatgtatgtttatttgttgttgcattgtttattggnnnctcatttattgattatacaaccactgtaactagctttcatggttatgattttaagtacattgagaatggtcagttgaaggtgtttgaagcacctttacactgtgttcgtaatgtttttgataattttaatcaatggcatgaggctaagtttggtgttgttactactaatagtgataaatgtcctatagttgttggtgtttcagagcgtattaatgttgttcctggtgttccaacaaatgtatatttggtaggaaagactcttgtttttacattacaggctgcttttggaaacacaggtgtttgttatgactttgatggtgttaccactagtgataagtgtatttttaattctgcttgtactaggttggaaggtttgggtggtgacaatgtttattgttacaacactgatcttattgaaggttctaaaccttatagtactttacagcctaatgcttattataagtatgatgttaaaaattatgtacgttttccagaaattttagctagaggttttggtttacgtactattagaactttggctacacgttattgtagagttggtgaatgccgtgactcacgtaaaggtgtttgttttggttttgataaatggtatgttaatgatggacgtgttgatgacggttacatttgtggtgatggtcttatagaccttcttgttaatgtactctcaatctttagttcatcttttagcgttgtggctatgtctggacatatgttgtttaattttctttttgcagcatttattacatttttgtgctttttagttactaaatttaaacgtgtttttggtgatctttcttatggtgtttttactgttgtttgtgcaactttgattaataacatttcttatgttgttactcaaaatttattttttatgttgctttatgctattttgtattttgtttttactaggacagtgcgttatgcttggatttggcatattgcatatattgttgcatacttcttgttaataccatggtggcttctcacatggtttagttttgctgcatttttagagcttttacctaatgtttttaagttaaaaatctctactcaattgtttgaaggtgataagtttataggtacttttgagagtgctgctgcaggtacatttgttcttgacatgcgttcttatgaaaggctgataaatactatttcacctgagaaacttaagaattatgctgcaagttataataaatataaatattatagtggtagtgctagtgaggctgactatcgttgtgcttgttatgctcatttagccaaggctatgttagattacgcaaaagatcataatgacatgttatattctccacctaccattagctacaattccaccttacaatctggtcttaagaagatggcacaaccatctggttgtgttgagagatgtgtggttcgcgtctgttatggtagtactgtgcttaatggagtttggttaggtgacactgttacttgtcctagacatgtcatagcaccatcaaccactgttcttattgattatgatcatgcatatagtactatgcgtttgcataatttttcagtgtcttataatggtgtcttcttgggagttgttggtgttacaatgcatggctctgtgttgcgtattaaggtttcacaatctaatgtacatacacctaaacatgtttttaaaacgttgaaacctggtgattcttttaatattttagcatgttatgaaggtattgcatctggtgtttttggtgttaatttacgtacaaactttactattaaaggttcttttataaatggagcttgtggttctcctggttataatgttagaaatgatggtactgttgagttttgttatttacaccaaattgagttaggtagtggtgctcatgttggttctgattttactggtagtgtttatggtaattttgatgaccaacctagtttgcaagttgagagtgccaaccttatgctatcagataatgttgttgcctttttgtacgctgctttgttgaatggttgtaggtggtggttgcgttcaactagagttaatgttgatggttttaatgaatgggctatggctaatggttatacaagtgtttctagtgttgagtgctattctattttggcagcaaaaactggtgttagtgttgaacaattgttagcttccattcaacatcttcatgaaggttttggtggtaaaaacatacttggttattctagtttatgtgatgagttcacgctagctgaagttgtgaagcagatgtatggtgttaacttgcaaagtggtaaggttatttttggtttaaaaacaatgtttttatttagcgttttcttcacaatgttttgggcagaactctttatttatacaaacactatatggataaaccctgtgatacttacacctgtattttgtctacttttgtttttgtcattatttttaactatgtttcttaaacataagtttttgtttttgcaagtatttttattacctactgttattgcaactgctttatataattgtgttttggattattacatagtaaaatttttggctgaccattttaactataatgtttcagtattacaaatggatgttcagggtttagttaatgttttggtctgtttatttgttgtatttttacacacatggcgcttttctaaagaacgttttacacattggtttacatatgtgtgttctcttatagcagttgcttacacttatttttatagtggtgactttttgagtttgcttgttatgtttttatgtgctatatctagtgattggtacattggtgccattgtttttaggttatcacgtttgattgtaattttttcacctgaaagtgtatttagtgtttttggtgatgtgaaacttactttagttgtttatttaatttgtggttatttagtttgtacttattggggcattttgtattggttcaataggttttttaaatgtactatgggtgtttatgattttaaggtgagtgctgctgaatttaaatacatggttgctaatggacttcatgcaccacatggaccttttgatgcactttggttatcattcaaactacttggtattggtggtgaccgttgtataaaaatttcaactgtccaatccaaactgactgatttgaagtgtactaatgttgtgttattgggttgtttgtctagtatgaacattgcagctaattctagtgaatgggcttattgtgttgatttacacaataagattaatctttgtgatgaccctgaaaaagctcaaggtatgttgttagcactccttgcgttctttctaagtaaacatagtgattttggtcttgatggccttattgattcttattttgataatagtagcacccttcagagtgttgcttcatcatttgttagtatgccatcatatattgcttatgaaaatgctagacaagcttatgaggatgctattgctaatggatcttcctctcaacttattaaacaattgaagcgtgccatgaatattgcaaagtctgaatttgatcatgaggtatctgttcagaagaaaattaatagaatggctgaacaagctgctactcagatgtataaagaagcacgctctgttaatagaaaatctaaagttattagtgctatgcactctttactttttggaatgttaagacgtttggatatgtctagtgttgaaactgttttgaatttagcacgtgatggtgttgtgccattgtcagttatacctgcaacttcagcttctaaactaactattgttagtccagatcttgaatcttattctaagattgtttgtgatggttctgttcattatgctggagttgtttggacacttaatgatgttaaagacaatgatggtagacctgttcatgttaaagagattacaaaggaaaatgttgaaactttgacatggcctcttatccttaattgtgaacgtgttgttaaacttcaaaataatgaaattatgcctggtaaacttaagcaaaaacctatgaaagctgagggtgatggtggtgttttaggtgatggtaatgccttgtataatactgagggtggtaaaacttttatgtatgcttatatttctaataaagctgaccttaaatttgttaagtgggagtatgagggtggttgcaacacaatcgagttagactctccttgtcgatttatggtcgaaacacctaatggtcctcaagtgaagtatttgtattttgttaaaaatttaaataccttacgtagaggtgccgttcttggttttataggtgccacaattcgtctacaagctggtaaacaaactgaattggctgttaattctggacttttaactgcttgtgctttttcggttgatccagcaactacttacttggaggctgttaaacatggtgcaaaacctgtaagtaattgtattaagatgttatctaatggtgctggtaatggtcaagctataacaactagtgtagatgctaacaccaatcaagattcttatggtggagcatctatttgtttgtattgtcgggcccacgttcctcaccctagtatggatggttactgtaagtttaagggtaaatgtgttcaggttcctattggttgtttggatcctattaggttttgtttagaaaataatgtgtgtaatgtttgtggttgttggttgggacacgggtgtgcttgtgaccgtacaactattcaaagtgttgacatttcttatttaaacgagcaaggggttctagtgcagctcgactagaaccctgtaatggcacggacatcgataagtgtgttcgtgtttttgacatttataataaaaatgtttcattcttgggtaagtgtttgaagatgaactgtgttcgttttaaaaatgctgatcttaaggatggttattttgttataaagaggtgtactaagtcggttatggaacacgagcaatccatgtataacctacttaacttttctggtgctttggctgagcatgatttctttacttggaaagatggcagagtcatttatggtaatgttagtagacataatcttactaaatatactatgatggacttggtctatgctatgcgtaactttgatgaacaaaattgtgatgttctaaaagaagtattagttttaactggttgttgtgacaattcttattttgatagtaagggttggtatgacccagttgaaaatgaggatatacatagagtttatgcatctcttggcaaaattgtagctagagctatgcttaaatgcgttgctctatgtgatgcgatggttgctaaaggtgttgttggtgttttaacattagataaccaagatcttaatggtaacttttatgattttggtgattttgttgttagcttacctaatatgggtgttccctgttgtacatcatattattcttatatgatgcctattatgggtttaactaattgtttagctagtgagtgttttgtcaagagtgatatttttggtagtgattttaaaacttttgatttgcttaagtatgatttcactgaacataaagaaaatttattcaataagtactttaagcattggagttttgattatcatcctaattgtagtgactgttatgatgatatgtgtgttatacattgtgctaattttaatacactatttgctacaactataccaggtactgcttttggtccactatgtcgtaaagtttttatagatggtgttccacttgttacaactgctggttatcattttaagcaattaggtttggtttggaataaagatgttaacacacactcagttaggttgacaattactgaacttttgcaatttgtcaccgacccttccttgataatagcttcttccccagcactcgttgatcaacgcactatttgtttttctgttgcagcattgagtactggtttgacaaatcaagttgttaagccaggtcattttaatgaagagttttataactttcttcgtttaagaggtttctttgatgaaggttctgaacttacattaaaacatttcttcttcgcacagaatggtgatgctgctgttaaagattttgacttttaccgttataataagcctaccattttagagatttgtcaagctagagttacatataagatagtctctcgttattttgacatttatgnaggtggctgtattaaggcatgtgaagttgttgtaacaaatcttaataagagtgctggttggccattaaataagtttggtaaagctagtttgtattatgaatctatatcttatgaagaacaggatgctttgtttgctttgacaaagcgtaatgtcctccctactatgacacagctgaatcttaagtatgctattagtggtaaagaacgtgctagaactgttggtggtgtttctctgttgtctacaatgaccacaagacaataccatcaaaaacatcttaaatccattgttaatacacgcaatgccactgttgttattggtactaccaaattttatggtggttggaataatatgttgcgtactttaattgatggtgttgaaaaccctatgcttatgggttgggattatcccaaatgtgatagagctttgcctaacatgatacgtatgatttcagccatggtgttgggctctaaacatgttaattgttgtactgcaacagataggttttataggcttggtaatgagttggcacaagttttaacagaagttgtttattctaatggtggtttttattttaagccaggtggtacgacttctggtgacgctagtacagcttatgctaattctatttttaacatttttcaagccgtgagttctaacattaacaggttgcttagtgtcccatcagattcatgtaataatgttaatgttagggatctacaacgacgtctgtatgataattgctataggttaactagtgttgaagagtcattcattgatgattattatggttatcttaggaaacatttttcaatgatgattctctctgatgacggtgttgtctgttataacaaggattatgctgagttaggttatatagcagacattagtgcttttaaagccactttgtattaccagaataatgtctttatgagtacttctaaatgttgggttgaagaagatttaactaagggaccacatgagttttgttcccagcatactatgcaaatagttgacaaagatggtacctattatttgccttacccagatcctagtaggatcttgtcagctggtgtttttgttgatgatgttgttaagacagatgctgttgttttgttagaacgttatgtgtctttagctattgatgcataccctctttcaaaacaccctaattctgaatatcgcaaggttttttacgtattacttgattgggttaagcatcttaacaaaaatttgaatgagggtgttcttgaatctttttctgttacacttcttgataatcaagaagataagttttggtgtgaagatttttatgctagtatgtatgaaaattctacaatattgcaagctgctggtttgtgtgttgtttgtggttcacaaactgtacttcgttgtggtgattgtctgcgtaagcctatgttgtgcactaaatgcgcatatgatcatgtatttggtaccgaccacaagtttattttggctataacaccgtatgtatgtaatgcatcaggttgtggtgttagtgatgtcaaaaaattgtatcttggtggtttgaattactattgtacaaatcataaaccacagttgtcttttccattatgttcagctggtaatatatttggtctatataaaaattcagcaactggttccttagatgttgaagtttttaataggcttgcaacgtctgattggactgatgttagggactataaacttgctaatgatgttaaagatacacttagactctttgcggctgaaactattaaagctaaagaagagagtgttaagtcttcttatgcttttgcaactcttaaagaggttgttggacctaaagaattgcttcttagttgggaaagtggtaaagttaaaccacctttgaatcgtaattctgttttcacctgttttcaaataagtaaggactcaaaattccaaataggtgagttcatctttgagaaggttgaatatggttctgatactgttacgtataagtctactgtaactactaagttagttcctggtatgatttttgtcttaacatctcacaatgtccaacctttacgcgcaccaactattgcaaaccaagagaagtattctagcatttataaattgcaccctgcttttaatgtcagtgatgcatatgctaatttggttccatattaccaacttattggtaaacaaaagataactacaatacagggtcctcctggtagtggtaagtcacattgttccattggacttggattgtactacccaggtgcgcgtattgtttttgttgcttgtgcccatgctgctgttgattccttatgtgcaaaagctatgactgtttatagcattgataagtgtactaggattatacctgcaagagctcgggttgagtgttatagtggctttaaaccaaataacactagtgcacaatacatatttagcactgttaacgcattacctgagtgtaatgctgatatcgttgttgtagatgaagtttcaatgtgtacaaattatgacctttctgttattaatcagcgtttatcatataaacatattgtttatgttggtgacccacaacaacttcctgcacctagagtaatgattactaaaggtgttatggagcctgttgattataacgttgttactcaacgtatgtgtgctataggccctgatgtttttcttcataaatgttatagatgtcctgctgaaatagttaatacagtttctgaacttgtttatgagaacaagtttgtccctgttaaacctgctagtaaacagtgttttaaagtcttttttaagggtaatgtacaggttgacaatggttctagtattaacagaaagcagcttgaaatagttaagctgtttttagttaaaaatccaagttggagtaaggctgtgtttattnnnnnttataatagtcagaattatgttgctagtagatttttaggacttcaaattcaaactgttgattcttctcaaggtagtgagtatgattatgtaatctatgcacaaacttctgacactgcacatgcttgcaatgtaaaccgttttaatgttgctataacacgtgctaagaagggtatattttgtgtaatgtgtgataaaactttgtttgattcacttaagttttttgagattaaacatgcagatttacattctagccaggtttgtggcttgtttaaaaattgtacacgcactcctcttaatttaccaccaactcatgcacacactttcttgtcgttgtcagatcagtttaagactacaggtgatttagctgttcaaataggttcaaataacgtttgtacttatgaacatgttatatcatttatgggttttaggtttgatattagtattcctggtagtcatagtttgttttgtacacgtgactttgctattcgtaatgtgcgtggttggttgggtatggatgttgaaagtgctcatgtttgtggcgataacataggtactaatgttcctttacaggttggtttttcaaatggtgttaattttgttgtgcaaactgaaggttgtgtgtctaccaattttggtgatgttattaaacctgtttgtgcaaaatctccaccaggtgaacaatttagacaccttgttcctcttttacgtaaaggacaaccttggttaattgttcgtagacgcattgtgcaaatgatatctgattatttgtccaatttgtctgacattcttgtctttgttttgtgggcaggtagtttggaattaactacaatgcgttactttgtaaaaatagggccaattaaatattgttattgtggtaattttgccacttgttataattcagttagtaatgaatattgttgttttaaacatgcattgggttgtgattatgtttacaatccgtatgcttttgatatacaacagtggggttatgttggttccttgagccaaaaccaccacacattctgtaacattcatagaaacgagcatgatgcttctggtgatgctgttatgacacgttgtttggcagtacatgattgttttgtcaaaaatgttgattggactgtaacgtacccctttattgcaaatgagaaatttatcaatggctgtgggcgtaatgtccagggacatgttgttcgtgcagccttgaaattgtataaacctagtgttattcatgacattggtaatcctaaaggtgtacgttgtgctgttactgatgccaaatggtactgttatgacaagcaacctgttaatagtaatgtcaagttgttggattatgattatgcaacccatggtcaacttgatggtctttgtctattctggaattgtaatgttgatatgtatccagaattttcaattgtgtgtcgttttgacacacgtactcgttctgtttttaatttagaaggtgttaatggtggttctctttatgttaacaaacatgcgtttcatacaccagcatatgataaacgtgcttttgttaaattaaaacctatgccctttttttattttgatgacagtgattgtgatgttgtgcaagaacaagttaattatgtaccccttcgcgctagtagttgtgttacccgttgtaatataggtggtgctgtttgttcaaaacatgcaaattcgtatcaaaaatatgttgaggcatataatacatttacacaggcaggttttaacatttgggtaccacatagttttgatgtttataatttgtggcaaatnnnnnnnnnnnnnnnnnnnnnnnnnnnnnnnnnnnnngcatttaatgttgtaaaaaaagggtgttttactggtgttgatggtgagttacctgttgcagttgttaacgacaaagtttttgttcgctatggcgatgttgacaacttggttttcacaaataaaacaacattgcctactaatgttgcttttgaattgtttgcaaaacgaaaaatgggtttaacaccaccattgtctattctcaaaaatctcggtgttgttgctacatataaatttgttttatgggattatgaagctgaaagaccttttacctcatatactaagagtgtatgtaaatacactgattttaatgaggatgtttgtgtttgttttgacaatagtattcagggttcgtatgagcgttttacgcttactacgaacgctgttttattttctactgttgtcattaaaaatttaacacctataaagttgaattttggtatgttgaatggtatgccagtttcttctattaagggtgataaaggtgttgaaaaattagttaattggtacatatatgttcgtaaaaatggtcaatttcaagatcattatgatggtttttacactcaaggtaggaatttatcagactttacaccaagaagtgatatggagtatgattttcttaacatggatatgggtgtttttattaataaatatggtcttgaggattttaattttgaacatgttgtatatggtgatgtttcaaaaactacattaggaggtcttcatttgttgatatcacagtttaggcttagtaaaatgggtgttttgaaagctgatgattttgtcactgcttctgacacaactttgaggtgctgtactgttacttatcttaatgaacttagttcaaaagttgtttgtacttatatggatttgttgttggacgactttgttactatactaaagagtttagatcttggtgtaatatctaaagttcatgaagttattatagataataaaccttataggtggatgttgtggtgtaaagataaccacttgtccactttttatccacagttgcagtctgctgaatggaagtgtggttatgctatgccacaaatttataagcttcaacgtatgtgtttggaaccttgtaatttgtggcattatggtgctggtattaagttgcctagtggtataatgttaaatgttgttaaatacactcagctttgtcaatacctaaatagcactacaatgtgcgtacctcataatatgcgtgttttgcactatggtgctggttctgacaaaggtgtggcacctggtacaactgttttaaaacgttggctaccacctgatgcaataatcattgataatgatatcaatgattatgttagtgatgcagattttagcattacaggtgattgtgctactgtttatcttgaagataagtttgacttacttatttctgatatgtatgatggtagaattaaattttgtgatggtgaaaacgtctctaaagatgggttttttacttatcttaatggtgttattagagaaaaattagctattggtggtagtgttgccattaagattacagaatatagttggaataagtatctttatgaattaatacaaagatttgctttttggactttgttttgcacgtctgttaacacatcctcttcggaagcttttcttattggtattaattatttaggtgactttattcaaggtccttttatagctggtaacactgttcatgctaattatatattttggcgtaattctactattatgtctttgtcatacaattcagttttagatttaagtaagtttgaatgtaaacataaggccactgttgttgttacacttaaagataatgatgtaaatgatatggttttgagtttgattaagagtggtaggttgttgttacgcaataatggtcgttttggtggttttagtaatcatttagtctcaactaaatgaaacttttcttgattttgcttgttttgcccctggcctcttgcttttccacatgtaatagtaatgctaatctctctatgttacaattaggtgttcctgacaattcttcaactattgtcacgggtttattgccaactcattggatttgtgctaaccagagtacatctgtttactcagccaatggtttcttttatattgatgttggtaatcaccgtagtgcttttgctctccatactggttattatgatgttaatcagtattatatttatgttactaatgaaataggcttaaatgcttctgttactcttaagatttgtaagtttggtaacactacttttgattttttaagtaattcttctagttcttttgactgtatagttaatttgttatttacagaacagttaggtgcgcctttgggcataactatatctggtgaaactgtgcgtctgcatttatataatgtaactcgtactttttatgtgccagcagcttataaacttactaaacttagtgttaaatgttactttaactattcctgtgtttttagtgttgtcaacgccaccgttactgtgaatgtcaccacacataatggccgtgtagttaactacactgtttgtgatgattgtaatggttatactgataacatattttctgttcaacaggatggccgcattcctaatggtttcccttttaataattggtttttgctaactaatggttccacattagtggacggggtctctagactttatcaaccactccgtttaacttgtttatggcctgtacctggtcttaaatcttcaactggttttgtttattttaatgccactggttctgatgttaattgtaacggctatcaacataattctgttgctgatgttatgcgttacaatcttaacttcagtgctaattctgtggataatctcaagagtggtgttatagttttcaaaactctacagtacgatgttttgttttactgtagtaattcctcttcgggcgttctagacaccacaataccttttggcccttcctctcaaccttattactgttttataaatagaacnatnaacaccactcatgttagcacttttgtgggtgtcttaccacccactgtgcgtgagattgttgttgctagaactggtcagttttatattaatggttttaagtattttgatttgggttttatcgaagctgttaattttaatgtcacaactgctagtgccacagatttttggacggttgcatttgctacttttgttgatgttttggttaatgttagtgcaactaagattcaaaacttactttattgcgattctccatttgaaaagttgcagtgtgagcacttgcagtttggattgcaagatggtttttattctgcaaattttcttgatgataatgttttgcctgagacttatgttgcactccccatttattatcaacacacggacataaattttactgcaactgcatcttttggtggttcttgttatgtttgtaaaccacaccaggttaatttatctcttaatggtaacacttcagtgtgtgttagaacatctcatttctcaattaggtatatttataaccgcgttaagagtggttcaccaggtgactcttcatggcacatttatttaaagagtggcacttgtccattttctttttctaagttaaataattttcaaaagtttaagactatttgtttttcaaccgtcgcagtgcctggtagttgtaattttccacttgaagccacctggcattacacttcttatactattgttggtgctttgtatgttacttggtctgaaggtaattctattactggtgtaccttatcctgtctnnnnnnnnnnnnnnnnnnnnnnnnnnnnnnnnnnnnnnnnnnnnnnnnnnnnnnnnnnnnnnnnnnnnnnnnnnnnnattatacgttcttcaaaccagtcacttgctggtggtattacatatgtttctaactctggtaatttacttggttttaaaaatgtttccactggtaacatttttattgtgacaccatgtaaccaaccagaccaagtagctgtttatcaacaaagcattattggtgccatgactgctgttaatgagtctagatatggcttgcaaaacttactacagttacctaacttttattatgttagtaatggtagtaacaattgcactacggccgttatgacttattctaattttggtatttgtgctgatggttctttaattcctgttcgtctgcgcaattctagtgataatggtatttcagccataatcactgctaatttatctattccctctaactggactacttcagttcaagttgagtacctccaaattactagtactccaatagttgttgattgtgctacttatgtgtgtaatggtaaccctcgctgtaagaatctacttaagcagtatacttctgcttgtaaaactattgaagatgccttacgacttagtgctcatttggaaactaatgatgttagtagtatgctaactttcgatagcaatgcttttagtttggctaatgttactagttttggagattataacctttctagtgttttacctcagagaaacattcattcaagccgtatagcaggacgtagtgctttggaagatttgttgtttagcaaagttgttacatctggtttgggtactgttgatgttgactataagtcttgtactaaaggtctttctattgctgaccttgcttgtgctcagtactacaatggcataatggttttgccaggtgttgctgatgctgaacgtatggccatgtacacaggttctcttataggtggcatggtgctcggaggtcttacatcagcagccgccatacctttttctttggcactgcaagcacgacttaattatgttgctttacaaactgatgtgcttcaagaaaatcagaaaattttggctgcatcatttaataaggctattaataacattgttgcttcttttagtagcgttaatgatgctattacacaaactgcagaggctatacatactgttactattgcacttaataagattcaggatgttgttaatcaacagggtagtgctcttaaccatctcacttcacaattgagacataattttcaggccatttctaattcaattcaagctatttatgaccggcttgattcaattcaagccgatcaacaagttgacagattaattactggacggcttgcagctttgaatgcatttgtttcccaagttttgaataaatatactgaagttcgtagttccagacgcttagcacagcagaagattaatgaatgtgtcaaatcacaatctaatagatatggtttttgtggcaatggcacccatatcttttcaatcgtcaactcagctccagacggtttgctttttcttcatactgttttgctgccaaccgactacaagaatgtaaaggcgtggtcgggtatctgtgttgatggcatttacggctatgttctgcgtcaacctaacttggttctttattctgataatggtgtttttcgtgtaacttccagggtcatgtttcaacctcgtttacctgttttgtctgattttgtgcaaatatataattgtaatgttacttttgttaacatatctcgtgtcaagttacatactgtcatacctgactacgttgatgttaataaaacattacaagagtttgcacaaaatttaccaaagtatgttaagcctaattttgacttgactccttttaatttaacatatcttaatttgagttctgagttgaagcaactcgaagctaaaactgctagtcttttccaaactactgttgaattacaaggtcttattgatcagattaacagtacatatgttgacttgaagttgcttaataggtttgaaaattatattaaatggccttggtgggtttggctcattatttctgttgtttttgtcgtattgttgagtcttcttgtgttttgttgtctttctacaggttgttgtggttgttgcaattgtttaacttcatcaatgcgaggttgttgtgattgtggttcaactaaacttccttattacgaatttgaaaaggttcacgttcaataatgcctttcggtggcctatttcaacttactcttgaaagtactattaataagagtgtggctaatctcaaattaccacctcatgatgttactgtcttgcgtgacaatcttaaacctgttactacacttagtactatcactgcttatttgttagttagtttgtttgtcacttattttgctttattcaaacctcttactgctagaggtcgtgttgcttgttttgttttaaaactattgacactatttgtctatgtgcctttattggttctttttggtatgtatcttgacnnnnnnnnnnnnnnnnnnncgctgttgtttcgattcatacatgttggctattatgcctatctctataaaaatttttcatttgttttgttcaatgttactaaactatgcttcgtttcaggcaagtgttggtatcttgaacaatcattttatgaaaatcgttttgctgctatttatggtggtgaccactatgtcgttttaggtggtgaaactattacttttgtttcttttgatgacctttatgttgctattagaggttcttgtgaaaagaacctacaacttatgcgtaaggttgacttgtataatggtgctgtcatttacatttttgccgaagagcctgttgttggtatagtctactcttctcaactatacgaagatgttccttcgattaattgatgacaatggcattgtcctcaattctattttatggctccttgttatgatatttttctttgtgttggcaatgacctttattaaactgattcaattgtgttttacttgtcattatttttttagtaggacattatatcaaccagtttataaaatttttcttgcttaccaagactatatgcaaatagcacctgttccagctgaagtattaaatgtctaaactaaacgatgtctaatagtagtgtgcctctttcagaggtttatgtccatttacgtaactggaactttagttggaatttaattctaacagtttttatagttgtgttgcagtatgggcattataagtatagcagatttctttatggtttaaagatgtctgttttatggtgtttatggccacttgttctagctttgtctatttttgactgttttgtcaattttaatgtggactggatcttttttggttttagtattcttatgtctattattacactttgtttatgggttatgtattttgttaatagtttcagactttggcgccgtgtcaaaactttttgggcttttaatcctgaaactaatgcaatcatctctatccaggtttatggacataattactacttaccggtgatggctgcacctacaggtgttacattaacacttcttagtggtgtacttcttgttgatggccacaagattgctactcgtgttcaagtgggtcagttgcctaaatatgtaatagttgctacacctagtaccacaattgtttgtgaccgtgttggtcgctctgttaatgaaacaagccagactggttgggcattctacgtccgtgctaaacatggtgatttttctggtgttgcctctcaggagggtgttttgtcagaaagagagaagttgcttcatttaatctaaactaaacaaaatggctagtgtaaattgggccgatgacagagctgctaggaagaaatttcctcctccttcattttacatgcctcttttggttagttctgataaggcaccatatagggtcattcccaggaaccttgtccctattggtaagggtaataaagatgagcagattggttattggaatgttcaagagcgttggcgtatgcgcagggggcaacgtgttgatttgcctcctaaagttcatttttattacctaggtactggacctcataaggaccttaaattcagacaacgtcttgatggtgttgtttgggttgctaaggaaggtgctaaaactgttaataccagtcttggtaatcgcaaacgtaatcagaaacctttggaaccaaagttctctattgctttgcccccagagctctctgttgttgagtttgaggatcgctctaataactcatctcgtgctagcagtcgttcttcaactcgtaacaactcacgagactcttctcgtagtacttcaagacaacagtctcgcactcgttctgattctaaccagtcttcttcagatcttgttgctgctgttactttggctttaaagaacttaggttttgataaccagtcgaagtcacctagttcttctggtacttccactcctaagaaacctaataagcctctttctcaacccagggctgataagccttctcagttgaagaaacctcgttggaagcgtgttcctaccagagaggaaaatgttattcagtgctttggtcctcgtgattttaatcacaatatgggggattcagatcttgttcagaatggtgttgatgccaaaggttttccacagcttgctgaattgattcctaatcaggctgctttattctttgatagtgaggttagcactgatgaagtgggtgataatgttcagattacctacacctacaaaatgcttgtagctaaggataataagaaccttcctaagttcattgagcagattagtgcttttactaaacccagttctatcaaagaaatgcagtcacaatcatctcatgttgttcagaacacagtacttaatgcttctattccagaatctaaaccattggctgatgatgactcagccattatagaaattgtcaacgaggttttgcattaaattgttttgtaattccagttgaatgtttattattattagttgcaaccccatgcgtttagcgcatgataagggtttagtcttacacacaatggtaggccagtgatagtaaagtgtaagtaatttgctatcatattaacatgtctagaggaaagtcagaactttttctgtttgtgttgttggagtacttaaagatcgcataggcgcgccaacaatggaagagccaacaacatatctaaaaatgttttgtctggtacttgttaatgata

SEQ ID NO: 9 - DNA, 27075 bp, Artificial Sequence
  Human coronavirus 229E strain
gtgctgtgtgttctagtctaagggtttcgtgttccgtcacgagattccattctacaaacgccttacgcgaggttctgtctcgtgtttgtgtggaagcaaagttttgtctttgtggaaaccagtaactgttcctaatggcctgcaaccgtgtgacacttgccgtagcaagtgattctgaaatttctgcatatggctgttctactattgcgcaagccgtccgccgttatagcgaggccgctagcaatggttttagggcatgccgatttgtttcattagatttgcaggattgcatcgttggcattgcagatgatacatatgttatgggtctgcatggcaatcagacgttgttttgcaacataatgaaattttctgaccgtccttttatgcttcatgggtggttggttttttccaattcaaattaccttttggaggaatttgatgttgtcttcggtaagagaggtggtggtaatgtgacatacactgaccagtatctctgtggcgccgatggcaaacctgttatgagtgaagatttatggcagtttgttgaccatttcggtgagaacgaagaaattgtcatcaatggtcgtacttacgtttgtgcgtggcttactaagcgtaagcccttagattacaaacgtcagaacaacctcgccattgaagagattgaatacgtgcatggtgatgctttgcacacactacgcaatggttctgttcttgaaatggctaaggaagtgaagacatctagtaaagttgtgttaagcgatgctcttgacaaactttacaaagtctttggttctcctgttatgacaaatggttccaacatcctagaggcctttactaaacctgtgtttattagtgcattagttcaatgtacttgtggtaccaagtcttggtctgtgggtgattggaccggttttaaatcctcttgttgcaacttgatcagtaataaactgtgtgttgtgcctggtaatgttaaacctggtgatgctgtgattactactcagcaagctggtgctggtgttaagtatttttgtggcatgactcttaagtttgttgcaaatattgaaggtgtctctgtttggagagtgattgctcttcagagtgttgattgctttgttgcttcttccacttttgtagaagaggaacatgttaatagaatggacacattctgcttcaatgtacgcaatagtgttactgatgagtgtcgtctggccatgttgggtgctgaaatgactagtaatgtcagaagacaagttgcttcaggtgtcatagacattagtaccggctggtttgatgtttatgatgacatctttgctgaaagcaaaccatggtttgttcgcaaggctgaagacatttttggcccttgttggtctgctcttgtttctgcacttaaacaacttaaagtcactacaggtgaacttgtgagatttgttaagtctatttgcaattcagctgttgctgtcgtgggtggtactatacaaattctcgctagtgtgcctgagaagtttttgaatgcgtttgacgtgtttgtcacaactattcaaactgtctttgactgtgctgttgaaacttgtactattgccggtaaagcatttgacaaggtttttgactatgtcttgcttgataatgcgcttgtaaaacttgtcaccacaaagcttaagggtgttcgtgaaggtggccttaataaagttaagtatgcaacagttgttgttggttccactgaagaagttaaatcttcacgtgttgaacgtagcaatgctgtacttacaatcgccaacaattattccaaactttctgatgaagggtatactgttgtaattggcgatgtggcgtactttgctagtgacggctacttccgtcttatggccaatccaaatagtgtgttgactactgcagtctataaaccattggttgattttaatgtgaatgttattggtactagacctgaaaaatttccaaccactgtgacttgtgaaaatttagagtctgctgttttgtttgttaatgacaaaatcactgaattccaattggattacagtattgatgtcattgataatgaaataattgtcaaacctaatatcagcttatgtgttccactttatgtgagagactatgttgacaaatgggatgatttttgcagacaatatagtaacgagtcttggtttgaggatgattacaaggcttttatcagtgttttggatatcactgatgctgctgtgaaagctgcagaatctaaagccttcgttgatactattgttccaccttgcccatctattttgaaagttatagatgacggcaaaatatggaatggtgttattaaaaatgttaactatgttagagactggcttaagtcgttgaagttaaatctcacacaacagggtttgcttggaacatgtgcaaagcgttttaaacgttggcttggcattttgctagaggcctataatgcgtttttaaacactgttgtttctactgttaaaattggtggtttgacctttaaaacatatgcttttgataaaacttacattgtgatacgtgatatcgtgtgtaaggttgaaaataaaacagaagcagactggattgaactttttccacataatgacaggattaagtcctttagtacttttgagagtgcttacatgccaattgcagaccctacacattttgacattgaagaagttgaacttttagatgcagagtttgtagaaccaggctgtggtggtattttgtcagtaatagatgagcacgtcttttataagaaggatggtgtttattatccatcaaatggtactaacattctacctgttgcatttacaaaagccgctggtggtaaagtttcattttctgatgacgttgaagtaaaagacattgaacctgtttacagagtcaagctttgctttgagtttgaagatgaaaaacttgtagatgtttgtgaaaaggcaattggcaagaaaattaaacatgaaggtgactgggatagcctttgtaagactattcaatcagcactttctgttgtttcatgctatgtaaatctgcctacttattacatttatgatgaagaaggcggtaatgacttgagtttgcccgttatgatttctgaatggcctctttttgagtcagataaggaagaagatgttcaacaagctcaacaagaagctactcatattgctgaggatgttgttgaccaagttgaagaagtcaatagcatttttgacattgagacagtggatgttaaacatgagatgagtccttttgaaatgccatttgaagagttaaatggtttaaagatacttaaacaattggataacaactgctgggttaactcagttatgttacaaatacaattaactggtatacttgatggtgattatgctatgcagttttttaaaatgggccgagttgccaagatgattgaacgctgctacactgctgagcaatgtatacgtggtgctatgggtgatgttggtttgtgtatgtatagacttcttaaagacttacacactggttttatggttatggattataaatgtagttgtaccagtggtaggcttgaagaatcgggagctgttttgttttgtacgcccactaagaaggcgtttccttatggtacttgtctaaattgtaacgcacctcgcatgtgtacaattaggcagttacaaggtaccataatatttgtgcaacaaaaaccagaacctgttaaccctgtttcttttgttgttaaaccagtctgctcatcaatttttcgtggtgctgtgtcttgtggtcattaccagactaacatctattcacaaaatttgtgtgtggatggttttggtgttaacaagattcagccctggacaaatgatgcacttaatactatttgtattaaggatgcagattataatgcaaaagatgaaatatctgttacaccaattaaaaacacagttgatacaatacctaaggaagaatttgttgttaaagagaagttgaacgccttcctcgttcatggcaatgtagttttctaccaaggtgatgttgataccgttgttaatggtgttgactttgactttattgtaaatgctgctaatgagaaccttgctcatggtggaggacttgccaaagctttagatgtgcacactaaaggtaaacttcaacgtttatccaaagaacacattggattagcgggtaaagtaagagttggtacaggagttatggttgagtgtgatagccttagaatttttaatgttgttggtccacgcaagggtaaacatgaacgtgatttactcgtaaaagcttacaacactattaataacgaacaaggcacacctttaacaccaattttgagttgtggtatttttggtgtcaaactcgaaacttcattggaagttttgcttgatgtttgtaatacaaaagaagttaaagtttttgtttatacagacacagaagtttgtaaggttaaggattttgtgtctggtttagtgaatgttcaaaaagttgcacaacctaaaatagaacaaaaaccagtgtccttaattaaagttgcacccaagccttacagggtagatggtaaatttagttactttacagaagacttgttgtgtgtcgctgatgacaaacccattgttttgtttactgactctatgcttactttggatgaccgtggtttggctctagacaatgcacttagtggtgtgcttagtgctgctattaaggattgtgttgacataaataaagctataccttctggtaatcttattaagtttgacatagattctgttgttgtttacatgtgtgttgtgccatccgaaaaggacaaacatttagataataatgttcaacgatgcacacgtaagttgaatagacttatgtgtgatatagtttgtactataccagctgactacatcttgccattggtgttgtctagtttgacttgtaatgtttcttttgtaggtgaacttaaagctgctgaagctaaagttataactataaaggtgacagaggatggtgttaatgttcatgatgtgaccgtgacaacagataagtcatttgaacaacaagttggtgttattgctgacaaggacaaagatctttctggtgcagtacccagtgatcttaacacatctgaattgcttactaaagcaatagatgttgattgggtcgaattttatggctttaaagatgctgttacttttgcaacagttgatcatagtgcttttgcctatgaaagtgctgttgttaatggtattagagtgttaaaaaccagtgataataattgttgggtgaatgctgtttgtattgcactacagtatttgaaacctcattttatttcacaaggtcttgatgctgcgtggaataaatttgttttaggcgatgttgaaatttttgttgcatttgtttactatgttgcaagactagtgaaaggtgacaagggtgatgctgaagacactttgaataagttgtctaagtatcttgttaatgaagctcaagttcaattagaacattatagttcttgtgttgaatgtgatgctaaatttaaaaactctgttacatctatcaattctgctatagtttgtgctagtgtcaaacgtgatggtgtgcaagttggttattgtgtccatggtattaagtactattcacgtgttaaaagtgttagaggtagagctattatagtcagtgtcgaacagcttgaaccgtgtgttcagtctagacttttgagtggtgttgcttatactgctttttctggacctgttgataaaggtcattatactgtttatgacactgcaaagaaatcaatgtatgatggtgatcgttttgttaaacatgatctttctctgctgtctgtcacatcagttgttatggttggtgattatgttgcacctgttagtacagtgaaacctaaaccagtcatttctcaacttgatgaaaatgcacagaagttctttgattttggtgattttttggttcataattttgttatttttttcacatggttattgagtatgtttactttgtgtaaaactgcagtaactacatgtgatgttaaaataatggccaaagcaccacaaaggacgggtgttgttttaaaacgtagtcttaaatataacttaaaagcgtcagcagctgttcttaaatctaagtggtggctgcttgctaagtttacgaaactactgttacttatatatacattgtattcagtagttttgttttgtgtacgttttggaccgtttgagttttgtagtgagactgttaatggttatgctaagtcaaactttgtcaaggatgattactgtgatggttcattgggctgcaagatgtgtctttttggttatcaagagctaagtcaatttagccatttggatgttgtgtggaagcatataacagaccctttgtttagtaatatacaacctttcattgttatggttttgctgcttatatttggtgacaattatttgagatgcttcttgctgtattttgttgctcagatgataagcacagttggtgtttttctaggttataaggaaacaaattggttcttgcactttattccatttgatgttatttgtgatgaactgtttgtcactgttattgttattaaggttatttcttttgtcagacatgtgctttttggttgtgaaaacccagattgcattgcgtgttctaagagtgctagacttaagagattccctgttaacacaattgttaatggtgtgcaacgtttattttatgttaatgcaaatggtggtagtaagttttgtaagaaacatagatttttctgtgttgactgtgactcttatggttatggcagcacgtttataacacctgaagtttctagagaacttggtaacattactaaaacaaatgtgcaaccaacaggtccagcgtatgtcatgattgacaaagtggagtttgaaaatggtttttacaggttgtattccggtgaaacattttggcgttacaactttgatataactgaaagcaagtattcttgcaaagaggtttttaaaaattgtaatgttttggatgatttcatcgtgtttaacaataatgggaccaatgtaacgcaggttaaaaatgctagtgtttacttttcacagttgttgtgtaggcccattaaattagttgacagtgaacttttgtccactttgtcagttgattttaatggtgtcttacacaaggcatacatcgatgtactacgtaatagctttggtaaagatcttaatgctaatatgtctttagccgattgcaagagtgctttaggcctgtctattagtgatcatgaatttactagtgctatttctaatgcacatcgttgtgacgtgttgttatctgatttgtcatttaacaactttgtcagttcgtatgctaaacctgaggaaaaattatcagcttatgacttggcgtgttgtatgcgtgcaggtgctaaggttgttaatgccaatgttctgacaaaggaccaaactcctattgtttggcatgcaaaggattttaacagtctttctgctgaaggtcgtaagtatattgtaaaaactagcaaagctaagggtttgactttcttgttgacaattaatgaaaaccaagctgttacgcaaatacctgcaactagcattgttgctaagcaaggtgctggtgatgctggtcattcattaacatggctgtggttactgtgtggtcttgtgtgtttgattcaattctatttgtgctttttcatgccctattttatgcacgatgtagtgagtagttttgagggttatgattttaagtatatagaaaatggtcagttgaagaattttgaagcgccacttaaatgtgtcagaaacgtttttgaaaactttgaggactggcattatgctaagtttggcttcacacctttaaacaagcaaagctgtcctattgtagttggagtttctgaaattgttaatactgtcgctggcattccatctaatgtgtatcttgttggtaaaactttaatttttacactacaagctgcttttggtaatgctggtgtttgttatgacatttttggagtcacaacacctgaaaagtgcatttttacttctgcttgtactagattagaaggtttgggtggtaacaatgtttattgttataacacagagcttatggaaggttctttgccgtacagttcaatacaagctaatgcatattataaatatgataatggcaattttattaagttgccagaagttattgcacaaggctttggctttagaacagtacgtactattgctaccaaatactgccgcgtaggtgaatgtgttgactccaatgcaggtgtgtgttttggctttgacaagtggtttgttaatgatggacgtgttggcaatggttacgtttgtggtactggtttgtggaaccttgtatttaacatactttccatgttctcatcttcattctctgttgctgcaatgtcaggtcaaattttacttaattgtgcattaggtgcttttgctatcttttgttgttttcttgtgacaaagtttagacgcatgtttggtgacctttctgtaggtgtttgtactgttgttgttgctgttttgcttaacaatgtctcttacattgtaactcagaatctagtaacaatgattgcttatgccatattgtatttctttgctactagaagcttacgctatgcatggatttggtgtgctgcatatttaattgcgtatatttcttttgctccatggtggttgtgtgcttggtactttcttgctatgttgacaggtttgttacctagtttgctgaagcttaaagtttcgacaaatcttttcgaaggtgacaaatttgtaggtacatttgaaagtgctgctgcaggaacatttgtcattgacattcgttcttatgagaaacttgctaatagcatctctccagaaaagttgaaaagttatgctgctagctataatagatacaagtactatagtggtaatgcaaatgaagctgattaccgttgtgcttgttatgcctatttagcaaaagcaatgttggacttttcgcgtgatcataatgacatcttgtacacacctccgactgtcagttatggttctacattacaggctggtttgcgcaaaatggcacaaccatctggctttgtggaaaaatgtgttgtccgtgtctgctatggaaacactgtgttgaatgggttgtggcttggtgatattgtttattgcccacgtcatgttatcgcatctaacacaacttctgctatagattatgatcacgaatatagtattatgcggttgcataatttctctataatatctggtacagcatttcttggtgttgtaggtgctactatgcatggagtaactcttaaaattaaggtttcacagactaacatgcacacacctagacactcttttagaacactaaaatctggtgaaggttttaacatcttagcatgctatgatggttgtgctcagggtgtttttggtgtgaacatgagaactaattggactatccgtggttcatttattaatggtgcgtgtggttctcctggctataatcttaaaaatggcgaggtggaatttgtttatatgcatcaaattgaactcggaagtggtagtcatgtaggttctagctttgatggtgttatgtatggtggttttgaagaccaacctaatcttcaagttgaatctgcaaaccagatgttaacagttaatgtggttgcatttctttatgctgctatattgaatggttgcacatggtggcttaaaggtgataaattgtctgtggagcattataatgagtgggcacaggctaatggtttcacagttatgaatggtgaagacgctttttccattcttgctgctaaaactggtgtctgtgtggaaagattacttcatgctattcaagttttgaataatggatttggtggtaaacaaattttgggttattctagtctcaatgatgagttcagtattaatgaagttgtcaaacaaatgtttggtgttaacctgcaaagtggtaaaaccactagtatgtttaaatccataagcttgtttgctggtttctttgtcatgttctgggctgaattatttgtttataccaccactatttgggttaaccctggttttcttactccttttatgattttgcttgttgctttgtcactctgtcttacatttgttattaaacataaggttttgtttttgcaagtgtttttgttgccttcaattattgtggctgctattcaaaactgtgcttgggactaccatattacaaaggtgttggcagagaagtttgattataatgtttctgttatgcaaatggatatccagggttttgttaacatttttatttgtctttttgttgcactgttgcatacttggcgctttgctaaagagcgttgtacacattggtgcacttatttgttctcactcattgctgttttatacactgcattgtatagttatgactacgttagtttgctggttatgctactttgtgcaatttctaatgaatggtatattggtgctatcatttttagaatttgtcgttttggtgttgcatttttaccagtggaatacgtgtcttactttgatggtgttaaaactgtgctgttgttttacatgttgttaggctttgttagctgtatgtactatggtttgttgtactggattaacaggttctgtaagtgcacattaggtgtttatgatttctgtgttagtccagccgaatttaagtatatggttgctaatggtttgaatgcaccaaatggcccttttgatgcactctttctgtcttttaaactaatgggtattggtggtcctagaaccattaaagtctctactgtacagtctaaattgactgatcttaagtgcacaaacgtcgttctaatgggcattttgtctaacatgaacatagcttctaattcaaaggagtgggcatattgtgttgaaatgcacaataaaataaatttgtgtgacgaccctgaaactgctcaagagttattgctggcgttgttggcctttttcttgtctaagcatagtgattttggtcttggtgatcttgtcgattcttattttgagaacgactccattttgcaaagtgttgcatcttcttttgttggtatgccatcttttgttgcatatgaaacagcaagacaagagtatgaaaatgctgttgcaaatggttcctcaccacaaataatcaaacaattgaagaaggctatgaatgttgcaaaagctgagtttgacagggagtcatctgttcaaaagaaaattaacagaatggctgaacaagctgctgcagctatgtacaaagaagcacgtgctgttaatagaaaatcaaaagttgtaagtgcaatgcatagtttactctttggcatgctccgacgtttggacatgtctagtgttgacaatatccttaatatggcacgtaatggtgttgtccctctttccgttatccctgctacttctgcagccaggctcgtcgtcgtagtgccagatcatgattcatttgtgaaaatgatggtagatggttttgtgcactacgctggtgttgtttggatattacaggaagttaaggataatgacggtaagaatgtgcatcttaaagatgttacaaaggaaaaccaggaaatacttgtttggcctctgattttgacttgtgaacgtgtcgttaaattgcagaacaatgaaataatgccaggcaagatgaaggtcaaggccaccaaaggtgaaggtgatggaggcattattagtgaaggtaatgctctatacaacaatgaaggtggacgtgcatttatgtatgcatatgtgactacgaagcctggcatgaagtatgttaaatgggaacatgactctggtgtggttacagttgaattggaaccaccttgcagatttgttatagacacacctactggaccccaaattaagtatctttattttgttaagaatcttaacaatttaaggagaggtgctgttttgggttacattggtgccactgtgagattgcaagctggcaaacagactgagtttgtttcaaactcccatttattaacacattgtgcttttgctgttgacccagctgcagcctaccttgatgctgttaaacaaggcgcaaaacctgttggcaattgtgtaaagatgttgactaatggttctggtagtggtcaggctattactagtaccattgattctaacaccacgcaggacacatatggtggcgcgtctgtttgtatttattgcagagcacatgttgcacatccaaccatggacggtttttgtcagtataaaggtaagtgggtacaagtgcctataggtacaaatgaccctataagattttgtcttgaaaatactgtttgtaaagtttgtggttgttggcttaatcatggctgtacatgtgaccggactgctatccaaagttttgatagcagttatttaaacgagtcaggggctctagtgccgctcgactagagccctgtaatggtacagacatagattactgtgtccgtgcatttgacgtttacaataaagatgcgtcttttatcggaaaaaatctgaagtccaattgtgtgcgcttcaagaatgtagataaggatgacgcgttctatattgttaaacgttgcattaagtcagttatggaccacgagcagtccatgtataacttacttaaaggctgtaatgctgttgctaagcatgatttctttacttggcatgagggcagaaccatttatggtaatgttagtagacaggatcttactaaatacaccatgatggatttgtgcttcgctctgcgtaactttgatgaaaaagattgtggagtttttaaggagatattggttcttactggttgttgtaatactgattactttgaaatgaagaattggtttgaccccatagaaaatgaggatatacaccgtgtgtatgctgctttaggcaaggtagtcgcaaatgcaatgcttaagtgtgttgctttttgcgacgaaatggtgctcaaaggagttgttggtgttttgaccttagacaaccaagatcttaatgggaatttctatgacttcggtgattttgtattgtgtcctcctggaatgggaataccctactgcacgtcatactatgcttatatgatgcctgttatgggtatgactaattgtttagctagtgagtgctttatgaaaagtgacatctttggtcaagacttcaaaacttttgatttgttgaaatatgatttcacagaacataaggaggttttgtttaacaagtactttaagtattggggacaggattatcatcctgattgtgttgattgccatgacgagatgtgtattttgcattgttcaaattttaacacactcttcgcaaccacaattccaaacacagcttttggacctctgtgcagaaaagtgtttattgatggtgtacccgtagttgctactgctggttaccactttaaacaattaggacttgtgtggaacaaagatgttaacacccattctaccagacttactattactgaactcttacagtttgtgacagatccaacgcttatagttgcgtcatcgcctgccttggtggacaaacgcactgtttgtttttctgtcgctgctttgagtacaggattaacatcccaaacagtaaaacctggccattttaataaggagttttatgacttcttacgttctcaagggtttttcgatgagggttcagaattaacattgaagcatttcttttttacacaaaagggtgatgctgcaattaaagattttgattattatcgttacaacagacctaccattctggatattggacaagctcgcgtagcatatcaagtggcagctcgctattttgactgttacgagggtggctgtattacatctagagaggttgttgttacaaaccttaataaaagcgctggttggccccttaataagtttggtaaagctggtttatattatgagtctattagttatgaggaacaagatgctatttttttattaacaaagcgtaatattctccctactatgactcagttaaatcttaaatatgccatatctggtaaggaacgtgcacgtacagtgggtggcgtctctttattagctactatgactacacgacagtttcatcagaaatgtctaaaatccatagtagctaccagaaatgccactgttgttatcggcactaccaagttttatggcggttgggataatatgttaaagaacctgatggccgatgttgacgatcctaaattgatgggatgggactatcctaagtgcgatagagctatgccctcaatgattcgtatgttgtcggctatgattttaggttctaagcatgtcacatgttgtacggctagtgataaattttatagacttagtaatgagcttgctcaagttttgaccgaggttgtttattcaaatggtgggttttattttaaacctggtggtacaacttctggtgatgcaactacagcctacgccaattctgtctttaatatatttcaggctgtaagttctaacattaattgcgttttgagcgttaactcgtcaaattgcaataattttaatgttaagaagttacagagacaactctatgataattgctatagaaatagtaatgttgatgaatcttttgtggatgacttttatggttatttgcaaaagcatttttctatgatgattctttctgatgatggtgttgtgtgctacaataaaacttatgctgaacttggttacattgctgatattagtgcttttaaagccactttgtattatcagaatggtgtgtttatgagtacagctaagtgttggactgaggaagatctttctataggacctcatgaattttgctcacagcacactatgcagattgtagatgaaaatggtaagtattatctaccatatccagatcctagccgtattatttctgctggtgtttttgtggatgacgtcactaagactgatgctgtcattcttttggaacgctatgtttctctggctatagatgcatacccattgtctaagcatcctaaacctgagtacaggaaggtgttttacgcattgttagattgggttaaacatctcaacaagactcttaacgaaggtgttttggagtctttttctgttacacttttagatgaacatgagtctaagttttgggatgaaagcttttatgctagtatgtatgagaagtctacagtattacaagctgctggtctttgtgtagtatgtggctctcaaacagttctaagatgcggtgattgtttacgcagacctatgttgtgcactaagtgcgcctatgatcatgtgtttggcactgatcataagttcattttagctattacaccatatgtttgtaacacatctggctgcaacgtaactgacgttacaaaactgtatcttggaggtttgaattattactgtgtagaccacaaaccacatctttcattcccactgtgttcagctggtaatgtctttggtttgtacaaaagttctgctttgggttccatggacattgatgtctttaacaaactttctacctctgattggtctgacattcgcgactacaagctggctaatgatgcaaaagagtcactaaggttgtttgcagctgaaacggtcaaggctaaagaggaaagtgttaagtcatcatacgcttatgctaccctaaaggagattgtaggtcctaaggaacttttgcttttatgggaaagtggaaaagccaaaccaccgttaaaccgtaattctgtttttacatgcttccaaattacaaaagactccaagtttcaagttggtgagtttgtgtttgagaaagtagattatggttctgatacggttacttacaaatccactgctactactaagttagtaccaggtatgttatttattttgacttctcataatgttgctccacttagagcgccaacaatggcaaaccaggagaaatattctaccatttacaagttgcacccatcatttaatgttagtgatgcttatgcaaatcttgtaccttattaccaacttattggcaaacagcgtatcaccacaatacagggtcctcctggtagtggaaaatcgcattgctctattggtattggtgtgtattaccctggagcgaggatcgtgttcactgcttgttctcacgctgctgttgattcgctttgtgcaaaagctgtcacagcctatagtgttgataagtgtacacgtattattcctgcacgtgccagagttgagtgttatagtggttttaaacctaataacactagtgcacaatacgtgtttagtactgttaatgcgttacctgaagttaatgcagacattgttgtcgtggatgaggtgtctatgtgcactaactatgacttgtctgtgattaaccagcgtatatcatataaacacattgtatatgttggtgatcctcaacagcttccagctcctagagttcttatctctaaaggtgttatggaaccaattgactataatgttgtgacacaacgtatgtgtgctataggacccgatgtctttttacacaagtgttacagatgtcctgctgaaatagttaacactgtttcagagcttgtttatgaaaacaagtttgtacctgtcaaagaagctagtaagcagtgcttcaaaatctttgaacgcggtagtgttcaggtagacaatggctccagtataaataggcgtcaacttgatgttgttaagcgatttatacataaaaactccacatggagcaaggctgtgtttatttcaccttacaatagtcaaaattatgtagctgccaggcttttaggtttacaaactcagacagtggattctgctcaaggtagtgaatatgactatgttatattcgcacagacatcagatactgctcatgcctgtaatgccaatcgttttaacgttgccattactagagcaaagaaaggtattttctgtattatgtctgacagaactttgtttgatgcacttaagttctttgaagttactatgacagatttacagtctgaaagcagttgtggtttgtttaaggattgtgcacgtaaccctattgatttaccaccaagtcatgccactacttatttgtcattgtctgatagatttaagactagtggtgacttggctgttcaaataggtaacaacaatgtttgtacctatgaacatgtgatttcatatatgggtttcaggtttgatgttagcatgcctggtagtcatagtttgttctgtactagagactttgccatgcgtcatgtcagaggttggttaggaatggatgtggaaggtgcacatgtcacaggtgacaatgttggcactaatgtacctctacaagttggtttttccaatggtgttgattttgtagctcaacctgaaggttgtgttttaacaaacactggcagtgttgtaaaacctgttcgtgctcgtgcacctcctggagaacaatttactcacattgtacctctgttacgcaagggacaaccttggagtgtgttgagaaaacgtattgttcaaatgatagcagattttcttgctggctcatctgatgtattggtgtttgtgctttgggctggcggtttagagttgaccactatgcgttattttgttaagattggagctgttaaacattgccaatgtggtactgttgcaacatgctacaattctgttagtaatgactattgttgctttaaacatgcattgggctgtgactatgtttataacccatatgtcatagatattcaacaatggggttatgttggttcactctccaataatcaccatgcaatttgtaatgttcatagaaatgaacacgttgcttctggtgatgctattatgactagatgtttggctgtgtatgattgctttgttaagaatgtggattggtcaattacctaccctacgatagctaatgaaaatgccataaacaagggcggtcgcactgtgcagagtcatattatgcgtgctgctattaaattgtacaaccctaaagcaatccatgacattggtaatcctaagggtattcgttgtgctgtaactgatgccaagtggtattgttatgacaagaaccctattaattctaatgtgaaaacattggagtatgattacatgacacatggccaaatggaaggcttgtgtttattttggaattgtaatgtggatatgtaccctgaattctcaattgtttgcaggtttgacacacgtacacgatctacattgaacctcgaaggtgtaaatggtggttcattgtatgtcaataaccatgcgtttcacactcctgcttatgataaacgtgctatggctaaattgaaaccagcaccgtttttctactatgacgacggttcatgtgaggttgttcacgatcaagttaactatgttcctttgagagccactaattgcattaccaagtgtaatattggtggtgctgtatgttctaagcacgctaatctctatagagcatatgttgagtcatataatatttttactcaagctggttttaatatttgggttcctaccacgtttgattgttataatttgtggcagacattcacagatgtcaatttacaaggtttagagaacattgcttttaacgttgttaataaaggttcatttgttggtgctgacggtgaattaccagtagccattagtggtgataaagtgttcgtacgtgatggtaacactgataatttagtctttgttaacaaaacatcactgcctacaaatatagcatttgaactttttgctaagaggaaggttggtttaacaccacctctcagtattctcaaaaaccttggtgttgtcgccacatataagtttgtcttgtgggattatgaagctgagcgtcccttgacaagctttactaagtctgtttgtggttatacagactttgcagaagatgtttgtacttgttacgataatagtatacaaggttcatacgaacgttttactctctcaactaatgctgtgttattctctgctactgctgtgaaaacaggtggtaagagtttgccggctattaaactgaattttggaatgcttaacggtaatgcaattgctactgtcaaatcagaagatggtaacataaaaaatattaactggtttgtttacgtacgcaaagatggtaaacatgttgatcattatgatggtttttatacccaaggtcgtaatttacaagactttttgcctcgcagcacaatggaagaagactttttgaacatggatataggcgtgtttattcaaaagtatggtctagaggatttcaacttcgagcacgttgtgtatggcgatgtttcaaaaactactctaggcggtttacacttgttgatttcacaagtacgtctgagtaaaatgggcatcttaaaggcagaggagtttgtggcagcatctgacataacactcaaatgttgtactgtgacttatcttaatgatcctagttctaagactgtttgtacttacatggatttgttgttggatgattttgtttctttattgaagtctttggatttgactgttgtatccaaggttcatgaggtcataattgacaacaaaccatggagatggatgctatggtgtaaagataatgccgttgctacattctatcctcagttgcagagtgcagaatggaaatgcgggtattctatgcctggtatttataagacacaacgtatgtgcttagaaccatgtaatttgtataattatggtgcaggtttgaagttgcccagtggcattatgttcaatgttgttaaatacactcaattgtgtcaatattttaacagtaccacgttatgtgttcctcataatatgagagtgttacacttgggtgctggctctgattatggtgttgcaccaggaactgctgttcttaaaaggtggttgccgcacgacgcaattgttgttgacaatgatgttgttgactatgtgagtgatgctgattttagtgttactggtgattgtgcaaccgtttatttggaagacaagtttgacttgttaatttctgatatgtacgatggtaggacaaaggcaattgatggtgaaaatgtttcaaaagaaggatttttcacttacatcaatggtttcatttgtgaaaaacttgccatcggaggttcaattgctattaaagtaacagagtatagctggaataagaaattgtatgaacttgtacaaagattttctttttggactatgttttgcacttctgttaatacgtcatcatcagaagcctttgttgtcggaattaactatcttggtgatttcgcacaaggaccttttatagatggtaacataatacatgcaaattatgtattttggcgtaactccactgttatgagtttgtcctacaactctgttttagacctgagtaaatttaattgcaaacacaaagctactgttgttgtgcaattaaaggatagtgatattaatgacatggtgcttagtcttgttaggagtggtaagttgcttgtaaggggtaatggcaagtgtttgagttttagtaatcatttagtctcaactaaataaaatgtttgttttacttgttgcatatgccttgttgcatattgctggttgtcaaactacaaatgggacgaacactagtcactctgtttgcaacggctgtgttggtcattcggaaaatgtatttgctgttgagagtggtggttatataccctccaactttgcatttaataattggttcctcttaactaatacctcatctgttgtagatggtgttgtgaggagttttcagcctttgttgcttaattgcttatggtctgtttctggctcgcaggttattactggttttgtctattttaatggtactgggagaggtgcttgtaaaggtttttattcaaatgcttcgtctgatgtcatacgttacaacatcaattttgaagaaaaccttagacgtggaaccattttgtttaaaacatcttatggtgctgttgtgttttattgtaccaacaacactttggtttcaggtgatgcgcacataccatctggtacagttttgggcaatttttattgctttgtaaatactactattggcaatgaaactacgtctgcttttgtgggtgcactacctaagacagttcgtgagtttgttatttcacgcacaggacatttttatattaatggctatcgctatttctctttaggtaatgtagaagccgttaatttcaatgtcactaatgctgcaaccactgtttgtactgttgcgttagcttcttatgctgacgttttggttaatgtttcacaaactgctattgctaatataatttattgcaattctgttattaacagactgagatgtgaccagctgtcctttgatgtaccagatggtttttattccacaagccctactcaacccgttgagctacctgtgtctattgtgtcgctacctgtttatcacaaacacacgtttattgtgttgtatgttaactttgaacatcagcgtggccctggcaagtgctataactgtcgtcctgctgttattaatattacactggccaattttaatgaaactaaagggcccttgtgtgttgacacatcacacttcactacccaattcgtcgacaatgtcaagcttgctaggtggagtgctagtattgacacgggaaattgccctttttcttttggcaaagttattaactttgttaaatttggcagtgtatgtttttcgctaaagtatatacccggtggttgcgcaatgcctataatggctaatttggttaattataaatctcataatataggctcattgtatgtttcttggagtgatggtgatgtaattactggcgtcccgaaacctgttgagggtgttagttcctttatgaatgttacattgaataaatgtactaaatataacatttatgatgtatctggtgtgggtgttattcgcattagcaatgacacctttcttaatggaattacgtacacatcaacttcaggtaaccttctgggttttaaagatgttactaatggcaccatctactctatcactccctgtaacccaccagatcagcttgttgtttatcagcaagctgttgttggtgctatgttgtctgaaaactttactagttacggcttttctaatgttgtagaaatgccgaaatttttctatgcgtccaatggcacttataattgcacagacgctgttttaacttattctagttttggcgtttgtgcagatggttctataattgctgttcaaccacgtaatgtttcatatgatagtgtttcagctattgtcacagctaatttgtctataccctccaattggaccacttcggtccaggttgagtatttacaaattacaagtacacctatcgtagttgattgctccacttatgtttgcaatggtaatgtgcgctgtgttgaattgcttaagcagtacacttctgcttgtaaaactattgaagacgccttaagaaatagcgccatgctggagtctgcagatgttagtgagatgctcacttttgacaagaaagcgtttacacttgctaatgttagtagttttggtgactacaaccttagcagtgttatacctagcttgcccagaagtggtagtagagtggctggtcgcagtgccatagaagacatactttttagcaaacttgttacgtctggacttggcactgtagacgcagactacaaaaagtgtactaagggtctttccattgctgacttggcttgtgcccaatattataatggcattatggttttgcctggcgccgctgatgctgaacgtatggccatgtatacaggttctttaattggtggaattgctttaggaggtcttacatcagccgcttcaataccattttcattagcaattcagtcacgtttaaattatgttgcattgcagactgatgttttacaagaaaatcagagaattcttgctgcatcttttaataaagcaatgaccaacatagtagatgcctttactggtgttaatgatgctattacacaaacttcacaagctctacaaacagttgctactgcacttaataagatccaggatgttgttaatcaacaaggcaactcattgaaccatttaacttctcagttgaggcagaattttcaagccatttctagctctattcaggctatctatgacagacttgatattattcaggctgatcaacaagtagataggctgattactggtagactggctgctctgaatgtattcgtttctcatacattgactaagtacactgaagttcgtgcttccagacagcttgcacaacaaaaagtgaatgagtgtgtcaaatcccagtctaagcggtatggcttctgtggaaatggcacgcacattttctcacttgttaatgctgctcctgaggggcttgtttttctccatactgtcttgctgccgacacaatataaggatgttgaagcgtggtctgggttgtgcgttgatggtataaacggttatgtgttgagacaacctaatcttgctctttacaaagaaggcaattattatagaattacatctcgcataatgtttgaaccacgtattcctaccatagcagattttgtccaaattgaaaattgcaatgtcacatttgttaacatttctcgctctgagttgcaaactattgtgccagagtatattgatgttaataagacgctgcaagaattaagttacaaattgccaaattacactgttccagacctagttgttgaacagtacaaccagactattttgaatttgaccagtgaaattagcacccttgaaaataaatctgcggagcttaattacactgttcaaaaactgcaaactttgatcgacaacataaatagcacattagttgacttaaagtggctcaaccgtgttgagacttatatcaagtggccttggtgggtgtggttgtgcatttcagtcgtgctcatctttgtggtgagtatgttgctattatgttgttgttctactggttgctgcggcttctttagttgttttgcatcttctattagaggttgttgtgaatcaactaaacttccttattacgacgttgaaaagatccacatacagtaatggctctaggtttgttcacattgcaatttgtgtctgctgttaatcaatctcttaccaagtcgaaagttagtgctgaagtttcacgacaggttatccaagacgtgaaagatggcactgttaccttcaacttgctagcgtatacactaatgagcctctttgttgtgtattttgctttatttaaagcaagatcacaccgtggtagatctgctcttatagtgtttaaaattttaatccttttcgtttatgtgccattgctgtattggtctcaagcatatattgacgcaacgttgattgctgtaattttgcttggaagatttttccatacagcttggcactgctggctctacaagacatgggatttcattgtcttcaatgcaaccacactttgctatgtgcaaggtaagtgttggtttcttgaaaataaggctctgaaaccattcgtctgtttttacggaggggaccaattcctttacataggtgacagaattgttacttatctctcaactaacgatttgtacgttgctcttagaggacgtattgataaagacctcagcctttctagaaaggttgagttatataacggtgaatgtgtatacttgttttgtgaacacccagctgttggaatagtcaatacagatttcaaattagaaatccactaagatgttccttaagctagtggatgatcatgctttgattgttaatgtactactctggtgtgtggtgcttatagtgatactactagtgtgtattacaataattaaactaattaagctttgtttcacttgccatatgttttgtaatagaacagtttatggccccattaaaaatgtgtaccatatttaccaatcatatatgcacatagaccctttccctaaacgagttattgatttctaaactaaacgacaatgtcaaacgacaattgtacgggtgacattgtcacccatttgaagaattggaattttggttggaatgttattctaaccatattcattgttattcttcagtttggacactataaatactccagattgttttatggtttgaagatgcttgtactgtggcttctttggccacttgtacttgctttgtcaatctttgacacctgggctaattgggactctaattgggcctttgttgcatttagcttccttatggccgtatcaacactcgttatgtgggtgatgtactttgcaaatagtttcagacttttccgacgtgctcgaactttttgggcatggaatcctgaggttaatgcaatcactgtcacaaccgtgttgggacagacatactatcaacccattcaacaagctccaacaggcattactgtgaccttgttgagcggcgtgctttacgttgacggacatagattggcttcaggtgttcaggttcataacctacctgaatacatgacagttgccgtgcctagtactactataatttatagtagagtcggaaggtccgtaaattctcaaaatagcacaggctgggttttctacgtacgagtaaaacacggtgatttttctgcagtgagctcccccatgagcaacatgacagaaaacgaaagattgcttcattttttctaaactgaacgaaaagatggctacagtcaaatgggctgatgcatctgaaccacaacgtggtcgtcagggtagaataccttattctctttatagccctttgcttgttgatagtgaacaaccttggaaggtgatacctcgtaatttggtacccgtcaacaagaaagacaaaaataagcttataggctattggaatgttcaaaaacgtttcagaactagaaagggcaaacgggtggatttgtcacccaagttacatttttattatcttggcacaggacctcataaagatgcaaaatttagagagcgtgttgaaggtgttgtctgggttgctgttgatggtgctaaaactgaacctacaggttacggtgttaggcgcaagaattcagaaccagagataccacacttcaatcaaaagctcccaaatggtgttactgttgctgaagaacctgactcccgtgctccttcccgttctcagtcaaggtctcagagtcgtattcaatctcggaatccttcaagtgacagaaaccataacagtcaggatgacatcatgaaggcagtcgctgcggctcttaaatctttaggttttgacaagcctcaggaaaaagacaaaaagtcagcgaaaacgggtacccctaagccttctcgtaatcagagtcctgcttcttctcaatctgctgccaagattcttgctcgttctcagagttctgaaacaaaagaacaaaagcatgaaatgcaaaagccacggtggaaaagacagcctaacgatgatgtgacatctaatgtcacacaatgttttggccccagagaccttgaccacaactttggaagtgcaggtgttgtggccaatggtgttaaagctaaaggctacccacaatttgctgagcttgtgccgtctacagctgctatgctttttgatagtcacattgtttccaaagagtcaggcaacactgtggtcttgactttcaccactagagtgactgtgcccaaagaccatccacacttgggtaagtttcttgaggaattaaatgcattcactagagaaatgcaacaacagcctcttcttaaccctagtgcactagaattcaacccatcccaaacttcacctgcaactgttgaaccagtgcgtgatgaagtttctattgaaactgacataattgatgaagtcaactaaacatgctactgtgttgaaattcaggctttagttggaattttgcttttgctcttgtttttattatctttcttttatgaatatatttctttcctctgatctacgtaatggtacgatcagagctgcttttaattaacatgatcccttgctttggcttgacaaggatctagtcttatacacaatggtaagcctgtggtagtaaaggtataagaaatttgctactatgttactgaacctaggtgaacgctagtataactcattacaattgtgctggagtaatcaaagatcgcattgacgagccaacaatggaagagccagtcatttgtcttgagacctatctagttagtaactgctaatggaacggtttcgatatggatacacaaaaaaa

SEQ ID NO: 10 - DNA, 18 bp, Artificial Sequence
  SARS-CoV-2A#80 ID-Oligo Region
ttccagtagcagtgacaa

SEQ ID NO: 11 - DNA, 21 bp, Artificial Sequence
  SARS-CoV-2A#79 ID-Oligo Region
tacgttaatagttaatagcgt

SEQ ID NO: 12 - DNA, 19 bp, Artificial Sequence
  SARS-CoV-2A#78 ID-Oligo Region
tactagcgtgcctttgtaa

SEQ ID NO: 13 - DNA, 20 bp, Artificial Sequence
  SARS-CoV-2A#77 ID-Oligo Region
tttgtgtctggtaactgtga

SEQ ID NO: 14 - DNA, 19 bp, Artificial Sequence
  SARS-CoV-2A#76 ID-Oligo Region
tttttatgaaccacaaatc

SEQ ID NO: 15 - DNA, 18 bp, Artificial Sequence
  SARS-CoV-2A#75 ID-Oligo Region
tttcctcgtgaaggtgtc

SEQ ID NO: 16 - DNA, 20 bp, Artificial Sequence
  SARS-CoV-2A#74 ID-Oligo Region
ttcacaactgctcctgccat

SEQ ID NO: 17 - DNA, 19 bp, Artificial Sequence
  SARS-CoV-2A#73 ID-Oligo Region
ttgattgccaaccaattta

SEQ ID NO: 18 - DNA, 18 bp, Artificial Sequence
  SARS-CoV-2A#72 ID-Oligo Region
tcatttattgaagatcta

SEQ ID NO: 19 - DNA, 22 bp, Artificial Sequence
  SARS-CoV-2A#71 ID-Oligo Region
ttaaagattttggtggttttaa

SEQ ID NO: 20 - DNA, 21 bp, Artificial Sequence
  SARS-CoV-2A#70 ID-Oligo Region
tttttgcacaagtcaaacaaa

SEQ ID NO: 21 - DNA, 19 bp, Artificial Sequence
  SARS-CoV-2A#69 ID-Oligo Region
tacttctaaccaggttgct

SEQ ID NO: 22 - DNA, 20 bp, Artificial Sequence
  SARS-CoV-2A#68 ID-Oligo Region
tgttcttactgagtctaaca

SEQ ID NO: 23 - DNA, 20 bp, Artificial Sequence
  SARS-CoV-2A#67 ID-Oligo Region
tcagcaactgtgttgctgat

SEQ ID NO: 24 - DNA, 17 bp, Artificial Sequence
  SARS-CoV-2A#66 ID-Oligo Region
tttgcatctgtttatgc

SEQ ID NO: 25 - DNA, 20 bp, Artificial Sequence
  SARS-CoV-2A#65 ID-Oligo Region
tctattgttagatttcctaa

SEQ ID NO: 26 - DNA, 20 bp, Artificial Sequence
  SARS-CoV-2A#64 ID-Oligo Region
taatttcaaaaatcttaggg

SEQ ID NO: 27 - DNA, 20 bp, Artificial Sequence
  SARS-CoV-2A#63 ID-Oligo Region
ttggatggaaagtgagttca

SEQ ID NO: 28 - DNA, 18 bp, Artificial Sequence
  SARS-CoV-2A#62 ID-Oligo Region
ttgttatttctagtgatg

SEQ ID NO: 29 - DNA, 20 bp, Artificial Sequence
  SARS-CoV-2A#61 ID-Oligo Region
tagatggttatgtcatgcat

SEQ ID NO: 30 - DNA, 19 bp, Artificial Sequence
  SARS-CoV-2A#60 ID-Oligo Region
tgaaacgatttgtgcacca

SEQ ID NO: 31 - DNA, 18 bp, Artificial Sequence
  SARS-CoV-2A#59 ID-Oligo Region
ttttgataaaagtgcttt

SEQ ID NO: 32 - DNA, 19 bp, Artificial Sequence
  SARS-CoV-2A#58 ID-Oligo Region
tgatctgtattgtcaagtc

SEQ ID NO: 33 - DNA, 19 bp, Artificial Sequence
  SARS-CoV-2A#57 ID-Oligo Region
tataagacatgtacgtgca

SEQ ID NO: 34 - DNA, 20 bp, Artificial Sequence
  SARS-CoV-2A#56 ID-Oligo Region
taggcatactttgcataatg

SEQ ID NO: 35 - DNA, 20 bp, Artificial Sequence
  SARS-CoV-2A#55 ID-Oligo Region
taggcgtggtaagagaattc

SEQ ID NO: 36 - DNA, 18 bp, Artificial Sequence
  SARS-CoV-2A#54 ID-Oligo Region
ttgctaactaagggcaca

SEQ ID NO: 37 - DNA, 19 bp, Artificial Sequence
  SARS-CoV-2A#53 ID-Oligo Region
tatagttgtctttgatgaa

SEQ ID NO: 38 - DNA, 18 bp, Artificial Sequence
  SARS-CoV-2A#52 ID-Oligo Region
tggtactggtaagagtca

SEQ ID NO: 39 - DNA, 18 bp, Artificial Sequence
  SARS-CoV-2A#51 ID-Oligo Region
tatgttagaattactggc

SEQ ID NO: 40 - DNA, 20 bp, Artificial Sequence
  SARS-CoV-2A#50 ID-Oligo Region
tcaaagctactgaggagaca

SEQ ID NO: 41 - DNA, 18 bp, Artificial Sequence
  SARS-CoV-2A#49 ID-Oligo Region
ttctatggtggttggcac

SEQ ID NO: 42 - DNA, 20 bp, Artificial Sequence
  SARS-CoV-2A#48 ID-Oligo Region
tctttgaccgttattttaaa

SEQ ID NO: 43 - DNA, 20 bp, Artificial Sequence
  SARS-CoV-2A#47 ID-Oligo Region
tagtggagttcctgttgtag

SEQ ID NO: 44 - DNA, 19 bp, Artificial Sequence
  SARS-CoV-2A#46 ID-Oligo Regio
tatattacgcgtatacgcc

SEQ ID NO: 45 - DNA, 19 bp, Artificial Sequence
  SARS-CoV-2A#45 ID-Oligo Region
tgacaatttaattgattct

SEQ ID NO: 46 - DNA, 20 bp, Artificial Sequence
  SARS-CoV-2A#44 ID-Oligo Region
tagtactgatgtcgtataca

SEQ ID NO: 47 - DNA, 19 bp, Artificial Sequence
  SARS-CoV-2A#43 ID-Oligo Region
tatggatcaagaatccttt

SEQ ID NO: 48 - DNA, 18 bp, Artificial Sequence
  SARS-CoV-2A#42 ID-Oligo Region
tcactaattgtgttaaga

SEQ ID NO: 49 - DNA, 18 bp, Artificial Sequence
  SARS-CoV-2A#41 ID-Oligo Region
taggtttgtacttgcact

SEQ ID NO: 50 - DNA, 20 bp, Artificial Sequence
  SARS-CoV-2A#40 ID-Oligo Region
taatggttgtcataccagac

SEQ ID NO: 51 - DNA, 19 bp, Artificial Sequence
  SARS-CoV-2A#39 ID-Oligo Region
ttactagtgctatgcagac

SEQ ID NO: 52 - DNA, 19 bp, Artificial Sequence
  SARS-CoV-2A#38 ID-Oligo Region
ttacaagctatagcctcag

SEQ ID NO: 53 - DNA, 21 bp, Artificial Sequence
  SARS-CoV-2A#37 ID-Oligo Region
tagcatagatgccttcaaact

SEQ ID NO: 54 - DNA, 20 bp, Artificial Sequence
  SARS-CoV-2A#36 ID-Oligo Region
tgtgtatgatgatggtgcta

SEQ ID NO: 55 - DNA, 20 bp, Artificial Sequence
  SARS-CoV-2A#35 ID-Oligo Region
tgttgacatactaggacctc

SEQ ID NO: 56 - DNA, 19 bp, Artificial Sequence
  SARS-CoV-2A#34 ID-Oligo Region
tggtacggacacaactatt

SEQ ID NO: 57 - DNA, 19 bp, Artificial Sequence
  SARS-CoV-2A#33 ID-Oligo Region
tttttcagtgttagcttgt

SEQ ID NO: 58 - DNA, 20 bp, Artificial Sequence
  SARS-CoV-2A#32 ID-Oligo Region
tctatcacctcagctgtttt

SEQ ID NO: 59 - DNA, 18 bp, Artificial Sequence
  SARS-CoV-2A#31 ID-Oligo Region
tcgaatgtacaactattg

SEQ ID NO: 60 - DNA, 19 bp, Artificial Sequence
  SARS-CoV-2A#30 ID-Oligo Region
tggataatcttgcctgcga

SEQ ID NO: 61 - DNA, 19 bp, Artificial Sequence
  SARS-CoV-2A#29 ID-Oligo Region
ttgaaacatcaaattcgtt

SEQ ID NO: 62 - DNA, 20 bp, Artificial Sequence
  SARS-CoV-2A#28 ID-Oligo Region
tatccaaacgcaagcttcga

SEQ ID NO: 63 - DNA, 20 bp, Artificial Sequence
  SARS-CoV-2A#27 ID-Oligo Region
taaaaccagttacttataaa

SEQ ID NO: 64 - DNA, 20 bp, Artificial Sequence
  SARS-CoV-2A#26 ID-Oligo Region
ttacacaacaaccataaaac

SEQ ID NO: 65 - DNA, 21 bp, Artificial Sequence
  SARS-CoV-2A#25 ID-Oligo Region
ttaagggtgtagaagctgtta

SEQ ID NO: 66 - DNA, 18 bp, Artificial Sequence
  SARS-CoV-2A#24 ID-Oligo Region
tggtgaagctgctaactt

SEQ ID NO: 67 - DNA, 19 bp, Artificial Sequence
  SARS-CoV-2A#23 ID-Oligo Region
ttaatgcctgtctgtgtgg

SEQ ID NO: 68 - DNA, 20 bp, Artificial Sequence
  SARS-CoV-2A#22 ID-Oligo Region
ttcttggaactgtttcttgg

SEQ ID NO: 69 - DNA, 19 bp, Artificial Sequence
  SARS-CoV-2A#21 ID-Oligo Region
tgcttaaaaagtgtaaaag

SEQ ID NO: 70 - DNA, 22 bp, Artificial Sequence
  SARS-CoV-2A#20 ID-Oligo Region
tgataagaaaatcaaagcttgt

SEQ ID NO: 71 - DNA, 21 bp, Artificial Sequence
  SARS-CoV-2A#19 ID-Oligo Region
tcttgctaaacactgtcttca

SEQ ID NO: 72 - DNA, 18 bp, Artificial Sequence
  SARS-CoV-2A#18 ID-Oligo Region
tgaggacaatcagacaac

SEQ ID NO: 73 - DNA, 20 bp, Artificial Sequence
  SARS-CoV-2A#17 ID-Oligo Region
ttggttagatgatgatagtc

SEQ ID NO: 74 - DNA, 19 bp, Artificial Sequence
  SARS-CoV-2A#16 ID-Oligo Region
ttgagccatcaactcaata

SEQ ID NO: 75 - DNA, 18 bp, Artificial Sequence
  SARS-CoV-2A#15 ID-Oligo Region
ttacttttggtgatgaca

SEQ ID NO: 76 - DNA, 20 bp, Artificial Sequence
  SARS-CoV-2A#14 ID-Oligo Region
tactgtgcccttgcacctaa

SEQ ID NO: 77 - DNA, 20 bp, Artificial Sequence
  SARS-CoV-2A#13 ID-Oligo Region
ttcccacagaagtgttaaca

SEQ ID NO: 78 - DNA, 22 bp, Artificial Sequence
  SARS-CoV-2A#12 ID-Oligo Region
tactgtgcccttgcacctaata

SEQ ID NO: 79 - DNA, 20 bp, Artificial Sequence
  SARS-CoV-2A#11 ID-Oligo Region
ttcccacagaagtgttaaca

SEQ ID NO: 80 - DNA, 20 bp, Artificial Sequence
  SARS-CoV-2A#10 ID-Oligo Region
ttatcttcttagagggagaa

SEQ ID NO: 81 - DNA, 19 bp, Artificial Sequence
  SARS-CoV-2A#9 ID-Oligo Region
tggcctactcatgcctcta

SEQ ID NO: 82 - DNA, 22 bp, Artificial Sequence
  SARS-CoV-2A#8 ID-Oligo Region
tataacaatactagatggaatt

SEQ ID NO: 83 - DNA, 18 bp, Artificial Sequence
  SARS-CoV-2A#7 ID-Oligo Region
taaaaaaggtgcctggaa

SEQ ID NO: 84 - DNA, 19 bp, Artificial Sequence
  SARS-CoV-2A#6 ID-Oligo Region
tcaacatcaatattgttgg

SEQ ID NO: 85 - DNA, 21 bp, Artificial Sequence
  SARS-CoV-2A#5 ID-Oligo Region
ttttgttaaagccacttgcga

SEQ ID NO: 86 - DNA, 18 bp, Artificial Sequence
  SARS-CoV-2A#4 ID-Oligo Region
ttgatggctttatgggta

SEQ ID NO: 87 - DNA, 20 bp, Artificial Sequence
  SARS-CoV-2A#3 ID-Oligo Region
tacactcgctatgtcgataa

SEQ ID NO: 88 - DNA, 19 bp, Artificial Sequence
  SARS-CoV-2A#2 ID-Oligo Region
tccaactcagtttgcctgt

SEQ ID NO: 89 - DNA, 20 bp, Artificial Sequence
  SARS-CoV-2A#1 ID-Oligo Region
taactcgtctatcttctgca

SEQ ID NO: 90 - DNA, 18 bp, Artificial Sequence
  SARS-CoV-2A#80 ID-Oligo
ttgtcactgctactggaa

SEQ ID NO: 91 - DNA, 20 bp, Artificial Sequence
  SARS-CoV-2A#79 ID-Oligo
cgctattaactattaacgta

SEQ ID NO: 92 - DNA, 19 bp, Artificial Sequence
  SARS-CoV-2A#78 ID-Oligo
ttacaaaggcacgctagta

SEQ ID NO: 93 - DNA, 20 bp, Artificial Sequence
  SARS-CoV-2A#77 ID-Oligo
tcacagttaccagacacaaa

SEQ ID NO: 94 - DNA, 19 bp, Artificial Sequence
  SARS-CoV-2A#76 ID-Oligo
gatttgtggttcataaaaa

SEQ ID NO: 95 - DNA, 18 bp, Artificial Sequence
  SARS-CoV-2A#75 ID-Oligo
gacaccttcacgaggaaa

SEQ ID NO: 96 - DNA, 20 bp, Artificial Sequence
  SARS-CoV-2A#74 ID-Oligo
atggcaggagcagttgtgaa

SEQ ID NO: 97 - DNA, 19 bp, Artificial Sequence
  SARS-CoV-2A#73 ID-Oligo
taaattggttggcaatcaa

SEQ ID NO: 98 - DNA, 18 bp, Artificial Sequence
  SARS-CoV-2A#72 ID-Oligo
tagatcttcaataaatga

SEQ ID NO: 99 - DNA, 20 bp, Artificial Sequence
  SARS-CoV-2A#71 ID-Oligo
aaaaccaccaaaatctttaa

SEQ ID NO: 100 - DNA, 20 bp, Artificial Sequence
  SARS-CoV-2A#70 ID-Oligo
ttgtttgacttgtgcaaaaa

SEQ ID NO: 101 - DNA, 19 bp, Artificial Sequence
  SARS-CoV-2A#69 ID-Oligo
agcaacctggttagaagta

SEQ ID NO: 102 - DNA, 20 bp, Artificial Sequence
  SARS-CoV-2A#68 ID-Oligo
tgttagactcagtaagaaca

SEQ ID NO: 103 - DNA, 19 bp, Artificial Sequence
  SARS-CoV-2A#67 ID-Oligo
tcagcaacacagttgctga

SEQ ID NO: 104 - DNA, 17 bp, Artificial Sequence
  SARS-CoV-2A#66 ID-Oligo
gcataaacagatgcaaa

SEQ ID NO: 105 - DNA, 20 bp, Artificial Sequence
  SARS-CoV-2A#65 ID-Oligo
ttaggaaatctaacaataga

SEQ ID NO: 106 - DNA, 20 bp, Artificial Sequence
  SARS-CoV-2A#64 ID-Oligo
ccctaagatttttgaaatta

SEQ ID NO: 107 - DNA, 20 bp, Artificial Sequence
  SARS-CoV-2A#63 ID-Oligo
tgaactcactttccatccaa

SEQ ID NO: 108 - DNA, 18 bp, Artificial Sequence
  SARS-CoV-2A#62 ID-Oligo
catcactagaaataacaa

SEQ ID NO: 109 - DNA, 20 bp, Artificial Sequence
  SARS-CoV-2A#61 ID-Oligo
atgcatgacataaccatcta

SEQ ID NO: 110 - DNA, 19 bp, Artificial Sequence
  SARS-CoV-2A#60 ID-Oligo
tggtgcacaaatcgtttca

SEQ ID NO: 111 - DNA, 18 bp, Artificial Sequence
  SARS-CoV-2A#59 ID-Oligo
aaagcacttttatcaaaa

SEQ ID NO: 112 - DNA, 19 bp, Artificial Sequence
  SARS-CoV-2A#58 ID-Oligo
gacttgacaatacagatca

SEQ ID NO: 113 - DNA, 19 bp, Artificial Sequence
  SARS-CoV-2A#57 ID-Oligo
tgcacgtacatgtcttata

SEQ ID NO: 114 - DNA, 20 bp, Artificial Sequence
  SARS-CoV-2A#56 ID-Oligo
cattatgcaaagtatgccta

SEQ ID NO: 115 - DNA, 20 bp, Artificial Sequence
  SARS-CoV-2A#55 ID-Oligo
gaattctcttaccacgccta

SEQ ID NO: 116 - DNA, 18 bp, Artificial Sequence
  SARS-CoV-2A#54 ID-Oligo
tgtgcccttagttagcaa

SEQ ID NO: 117 - DNA, 19 bp, Artificial Sequence
  SARS-CoV-2A#53 ID-Oligo
ttcatcaaagacaactata

SEQ ID NO: 118 - DNA, 18 bp, Artificial Sequence
  SARS-CoV-2A#52 ID-Oligo
tgactcttaccagtacca

SEQ ID NO: 119 - DNA, 18 bp, Artificial Sequence
  SARS-CoV-2A#51 ID-Oligo
gccagtaattctaacata

SEQ ID NO: 120 - DNA, 20 bp, Artificial Sequence
  SARS-CoV-2A#50 ID-Oligo
tgtctcctcagtagctttga

SEQ ID NO: 121 - DNA, 18 bp, Artificial Sequence
  SARS-CoV-2A#49 ID-Oligo
gtgccaaccaccatagaa

SEQ ID NO: 122 - DNA, 20 bp, Artificial Sequence
  SARS-CoV-2A#48 ID-Oligo
tttaaaataacggtcaaaga

SEQ ID NO: 123 - DNA, 20 bp, Artificial Sequence
  SARS-CoV-2A#47 ID-Oligo
ctacaacaggaactccacta

SEQ ID NO: 124 - DNA, 19 bp, Artificial Sequence
  SARS-CoV-2A#46 ID-Oligo
ggcgtatacgcgtaatata

SEQ ID NO: 125 - DNA, 19 bp, Artificial Sequence
  SARS-CoV-2A#45 ID-Oligo
agaatcaattaaattgtca

SEQ ID NO: 126 - DNA, 20 bp, Artificial Sequence
  SARS-CoV-2A#44 ID-Oligo
tgtatacgacatcagtacta

SEQ ID NO: 127 - DNA, 19 bp, Artificial Sequence
  SARS-CoV-2A#43 ID-Oligo
aaaggattcttgatccata

SEQ ID NO: 128 - DNA, 18 bp, Artificial Sequence
  SARS-CoV-2A#42 ID-Oligo
tcttaacacaattagtga

SEQ ID NO: 129 - DNA, 18 bp, Artificial Sequence
  SARS-CoV-2A#41 ID-Oligo
agtgcaagtacaaaccta

SEQ ID NO: 130 - DNA, 20 bp, Artificial Sequence
  SARS-CoV-2A#40 ID-Oligo
gtctggtatgacaaccatta

SEQ ID NO: 131 - DNA, 19 bp, Artificial Sequence
  SARS-CoV-2A#39 ID-Oligo
gtctgcatagcactagtaa

SEQ ID NO: 132 - DNA, 19 bp, Artificial Sequence
  SARS-CoV-2A#38 ID-Oligo
ctgaggctatagcttgtaa

SEQ ID NO: 133 - DNA, 20 bp, Artificial Sequence
  SARS-CoV-2A#37 ID-Oligo
gtttgaaggcatctatgcta

SEQ ID NO: 134 - DNA, 20 bp, Artificial Sequence
  SARS-CoV-2A#36 ID-Oligo
tagcaccatcatcatacaca

SEQ ID NO: 135 - DNA, 20 bp, Artificial Sequence
  SARS-CoV-2A#35 ID-Oligo
gaggtcctagtatgtcaaca

SEQ ID NO: 136 - DNA, 19 bp, Artificial Sequence
  SARS-CoV-2A#34 ID-Ol
aatagttgtgtccgtacca

SEQ ID NO: 137 - DNA, 19 bp, Artificial Sequence
  SARS-CoV-2A#33 ID-Oligo
acaagctaacactgaaaaa

SEQ ID NO: 138 - DNA, 20 bp, Artificial Sequence
  SARS-CoV-2A#32 ID-Oligo
aaaacagctgaggtgataga

SEQ ID NO: 139 - DNA, 18 bp, Artificial Sequence
  SARS-CoV-2A#31 ID-Oligo
caatagttgtacattcga

SEQ ID NO: 140 - DNA, 19 bp, Artificial Sequence
  SARS-CoV-2A#30 ID-Oligo
tcgcaggcaagattatcca

SEQ ID NO: 141 - DNA, 19 bp, Artificial Sequence
  SARS-CoV-2A#29 ID-Oligo
aacgaatttgatgtttcaa

SEQ ID NO: 142 - DNA, 20 bp, Artificial Sequence
  SARS-CoV-2A#28 ID-Oligo
tcgaagcttgcgtttggata

SEQ ID NO: 143 - DNA, 20 bp, Artificial Sequence
  SARS-CoV-2A#27 ID-Oligo
tttataagtaactggtttta

SEQ ID NO: 144 - DNA, 20 bp, Artificial Sequence
  SARS-CoV-2A#26 ID-Oligo
gttttatggttgttgtgtaa

SEQ ID NO: 145 - DNA, 20 bp, Artificial Sequence
  SARS-CoV-2A#25 ID-Oligo
aacagcttctacacccttaa

SEQ ID NO: 146 - DNA, 18 bp, Artificial Sequence
  SARS-CoV-2A#24 ID-Oligo
aagttagcagcttcacca

SEQ ID NO: 147 - DNA, 19 bp, Artificial Sequence
  SARS-CoV-2A#23 ID-Oligo
ccacacagacaggcattaa

SEQ ID NO: 148 - DNA, 20 bp, Artificial Sequence
  SARS-CoV-2A#22 ID-Oligo
ccaagaaacagttccaagaa

SEQ ID NO: 149 - DNA, 19 bp, Artificial Sequence
  SARS-CoV-2A#21 ID-Oligo
cttttacactttttaagca

SEQ ID NO: 150 - DNA, 20 bp, Artificial Sequence
  SARS-CoV-2A#20 ID-Oligo
aagctttgattttcttatca

SEQ ID NO: 151 - DNA, 20 bp, Artificial Sequence
  SARS-CoV-2A#19 ID-Oligo
gaagacagtgtttagcaaga

SEQ ID NO: 152 - DNA, 18 bp, Artificial Sequence
  SARS-CoV-2A#18 ID-Oligo
gttgtctgattgtcctca

SEQ ID NO: 153 - DNA, 20 bp, Artificial Sequence
  SARS-CoV-2A#17 ID-Oligo
gactatcatcatctaaccaa

SEQ ID NO: 154 - DNA, 19 bp, Artificial Sequence
  SARS-CoV-2A#16 ID-Oligo
tattgagttgatggctcaa

SEQ ID NO: 155 - DNA, 18 bp, Artificial Sequence
  SARS-CoV-2A#15 ID-Oligo
tgtcatcaccaaaagtaa

SEQ ID NO: 156 - DNA, 20 bp, Artificial Sequence
  SARS-CoV-2A#14 ID-Oligo
ttaggtgcaagggcacagta

SEQ ID NO: 157 - DNA, 20 bp, Artificial Sequence
  SARS-CoV-2A#13 ID-Oligo
tgttaacacttctgtgggaa

SEQ ID NO: 158 - DNA, 22 bp, Artificial Sequence
  SARS-CoV-2A#12 ID-Oligo
tattaggtgcaagggcacagta

SEQ ID NO: 159 - DNA, 20 bp, Artificial Sequence
  SARS-CoV-2A#11 ID-Oligo
tgttaacacttctgtgggaa

SEQ ID NO: 160 - DNA, 20 bp, Artificial Sequence
  SARS-CoV-2A#10 ID-Oligo
ttctccctctaagaagataa

SEQ ID NO: 161 - DNA, 19 bp, Artificial Sequence
  SARS-CoV-2A#9 ID-Oligo
tagaggcatgagtaggcca

SEQ ID NO: 162 - DNA, 20 bp, Artificial Sequence
  SARS-CoV-2A#8 ID-Oligo
ttccatctagtattgttata

SEQ ID NO: 163 - DNA, 18 bp, Artificial Sequence
  SARS-CoV-2A#7 ID-Oligo
ttccaggcacctttttta

SEQ ID NO: 164 - DNA, 19 bp, Artificial Sequence
  SARS-CoV-2A#6 ID-Oligo
ccaacaatattgatgttga

SEQ ID NO: 165 - DNA, 20 bp, Artificial Sequence
  SARS-CoV-2A#5 ID-Oligo
cgcaagtggctttaacaaaa

SEQ ID NO: 166 - DNA, 18 bp, Artificial Sequence
  SARS-CoV-2A#4 ID-Oligo
tacccataaagccatcaa

SEQ ID NO: 167 - DNA, 20 bp, Artificial Sequence
  SARS-CoV-2A#3 ID-Oligo
ttatcgacatagcgagtgta

SEQ ID NO: 168 - DNA, 19 bp, Artificial Sequence
  SARS-CoV-2A#2 ID-Oligo
acaggcaaactgagttgga

SEQ ID NO: 169 - DNA, 20 bp, Artificial Sequence
  SARS-CoV-2A#1 ID-Oligo
tgcagaagatagacgagtta

SEQ ID NO: 170 - DNA, 12 bp, Artificial Sequence
  SARS-CoV-2A#80 T-Free sequence
aaacacagacca

SEQ ID NO: 171 - DNA, 13 bp, Artificial Sequence
  SARS-CoV-2A#79 T-Free sequence
cggaagagacagg

SEQ ID NO: 172 - DNA, 14 bp, Artificial Sequence
  SARS-CoV-2A#78 T-Free sequence
gaaccgacgacgac

SEQ ID NO: 173 - DNA, 12 bp, Artificial Sequence
  SARS-CoV-2A#77 T-Free sequence
acagacaacaca

SEQ ID NO: 174 - DNA, 12 bp, Artificial Sequence
  SARS-CoV-2A#76 T-Free sequence
aacacaaaggaa

SEQ ID NO: 175 - DNA, 12 bp, Artificial Sequence
  SARS-CoV-2A#75 T-Free sequence
ggaaaagcacac

SEQ ID NO: 176 - DNA, 15 bp, Artificial Sequence
  SARS-CoV-2A#74 T-Free sequence
gcacaagaaaagaac

SEQ ID NO: 177 - DNA, 12 bp, Artificial Sequence
  SARS-CoV-2A#73 T-Free sequence
gagaaccaaaaa

SEQ ID NO: 178 - DNA, 17 bp, Artificial Sequence
  SARS-CoV-2A#72 T-Free sequen
caaaaccaagcaagagg

SEQ ID NO: 179 - DNA, 15 bp, Artificial Sequence
  SARS-CoV-2A#71 T-Free sequence
acaaaacaccaccaa

SEQ ID NO: 180 - DNA, 25 bp, Artificial Sequence
  SARS-CoV-2A#70 T-Free sequence
gaacaagacaaaaacacccaagaag

SEQ ID NO: 181 - DNA, 15 bp, Artificial Sequence
  SARS-CoV-2A#69 T-Free sequence
aacaccaggaacaaa

SEQ ID NO: 182 - DNA, 12 bp, Artificial Sequence
  SARS-CoV-2A#68 T-Free sequence
aacaggcacagg

SEQ ID NO: 183 - DNA, 13 bp, Artificial Sequence
  SARS-CoV-2A#67 T-Free sequenc
aacaggaagagaa

SEQ ID NO: 184 - DNA, 12 bp, Artificial Sequence
  SARS-CoV-2A#66 T-Free sequence
aacgccaccaga

SEQ ID NO: 185 - DNA, 13 bp, Artificial Sequence
  SARS-CoV-2A#65 T-Free sequence
ccaaccaacagaa

SEQ ID NO: 186 - DNA, 14 bp, Artificial Sequence
  SARS-CoV-2A#64 T-Free sequence
gaaggaaaacaggg

SEQ ID NO: 187 - DNA, 19 bp, Artificial Sequence
  SARS-CoV-2A#63 T-Free sequence
accacaaaaacaacaaaag

SEQ ID NO: 188 - DNA, 16 bp, Artificial Sequence
  SARS-CoV-2A#62 T-Free sequence
agagaaaacaacagag

SEQ ID NO: 189 - DNA, 19 bp, Artificial Sequence
  SARS-CoV-2A#61 T-Free sequence
ggcaaaccacgcgaacaaa

SEQ ID NO: 190 - DNA, 15 bp, Artificial Sequence
  SARS-CoV-2A#60 T-Free sequence
agccaagaaaccaac

SEQ ID NO: 191 - DNA, 12 bp, Artificial Sequence
  SARS-CoV-2A#59 T-Free sequence
ccacacaccagc

SEQ ID NO: 192 - DNA, 12 bp, Artificial Sequence
  SARS-CoV-2A#58 T-Free sequence
acaaagcaacca

SEQ ID NO: 193 - DNA, 15 bp, Artificial Sequence
  SARS-CoV-2A#57 T-Free sequence
cacccgcgaagaagc

SEQ ID NO: 194 - DNA, 13 bp, Artificial Sequence
  SARS-CoV-2A#56 T-Free sequence
accagagcaaaag

SEQ ID NO: 195 - DNA, 13 bp, Artificial Sequence
  SARS-CoV-2A#55 T-Free sequence
aacaggccacaaa

SEQ ID NO: 196 - DNA, 12 bp, Artificial Sequence
  SARS-CoV-2A#54 T-Free sequence
gcaccacgcaca

SEQ ID NO: 197 - DNA, 14 bp, Artificial Sequence
  SARS-CoV-2A#53 T-Free sequence
gagacgacagcaga

SEQ ID NO: 198 - DNA, 12 bp, Artificial Sequence
  SARS-CoV-2A#52 T-Free sequence
ccagggaccacc

SEQ ID NO: 199 - DNA, 13 bp, Artificial Sequence
  SARS-CoV-2A#51 T-Free sequence
gccacaagagcac

SEQ ID NO: 200 - DNA, 13 bp, Artificial Sequence
  SARS-CoV-2A#50 T-Free sequence
gcagcagaaacgc

SEQ ID NO: 201 - DNA, 12 bp, Artificial Sequence
  SARS-CoV-2A#49 T-Free sequence
ggaacaagcaaa

SEQ ID NO: 202 - DNA, 20 bp, Artificial Sequence
  SARS-CoV-2A#48 T-Free sequence
cacggaagagaggttaaaac

SEQ ID NO: 203 - DNA, 15 bp, Artificial Sequence
  SARS-CoV-2A#47 T-Free sequence
acaaaccacgccagg

SEQ ID NO: 204 - DNA, 12 bp, Artificial Sequence
  SARS-CoV-2A#46 T-Free sequence
agaaaacccaga

SEQ ID NO: 205 - DNA, 18 bp, Artificial Sequence
  SARS-CoV-2A#45 T-Free sequence
ccaagaaaaggacgaaga

SEQ ID NO: 206 - DNA, 13 bp, Artificial Sequence
  SARS-CoV-2A#44 T-Free sequence
gcggcacaggcac

SEQ ID NO: 207 - DNA, 14 bp, Artificial Sequence
  SARS-CoV-2A#43 T-Free sequence
acaccggaagccaa

SEQ ID NO: 208 - DNA, 13 bp, Artificial Sequence
  SARS-CoV-2A#42 T-Free sequence
gggggacaaccaa

SEQ ID NO: 209 - DNA, 19 bp, Artificial Sequence
  SARS-CoV-2A#41 T-Free sequence
acaacacaacaaagggagg

SEQ ID NO: 210 - DNA, 16 bp, Artificial Sequence
  SARS-CoV-2A#40 T-Free sequence
acaacagcagccaaac

SEQ ID NO: 211 - DNA, 19 bp, Artificial Sequence
  SARS-CoV-2A#39 T-Free sequence
gaggacaagagggcaaaag

SEQ ID NO: 212 - DNA, 16 bp, Artificial Sequence
  SARS-CoV-2A#38 T-Free sequence
ggacaacagggcaacc

SEQ ID NO: 213 - DNA, 19 bp, Artificial Sequence
  SARS-CoV-2A#37 T-Free sequence
gactactcccacccaagaa

SEQ ID NO: 214 - DNA, 12 bp, Artificial Sequence
  SARS-CoV-2A#36 T-Free sequence
gacagcaagaac

SEQ ID NO: 215 - DNA, 12 bp, Artificial Sequence
  SARS-CoV-2A#35 T-Free sequence
aacacaagacca

SEQ ID NO: 216 - DNA, 23 bp, Artificial Sequence
  SARS-CoV-2A#34 T-Free sequence
gacaggcaaacagcacaagcagc

SEQ ID NO: 217 - DNA, 22 bp, Artificial Sequence
  SARS-CoV-2A#33 T-Free sequence
ttcgcattcaaccaggacagac

SEQ ID NO: 218 - DNA, 17 bp, Artificial Sequence
  SARS-CoV-2A#32 T-Free sequence
accaaccaccacaaacc

SEQ ID NO: 219 - DNA, 13 bp, Artificial Sequence
  SARS-CoV-2A#31 T-Free sequence
agagcaacaagag

SEQ ID NO: 220 - DNA, 18 bp, Artificial Sequence
  SARS-CoV-2A#30 T-Free sequence
cagaggacgcgcagggaa

SEQ ID NO: 221 - DNA, 15 bp, Artificial Sequence
  SARS-CoV-2A#29 T-Free sequence
ggagcacaaaaccag

SEQ ID NO: 222 - DNA, 13 bp, Artificial Sequence
  SARS-CoV-2A#28 T-Free sequence
accaaaccaacca

SEQ ID NO: 223 - DNA, 12 bp, Artificial Sequence
  SARS-CoV-2A#27 T-Free sequence
acacaacaacca

SEQ ID NO: 224 - DNA, 13 bp, Artificial Sequence
  SARS-CoV-2A#26 T-Free sequence
acaaagaaaacag

SEQ ID NO: 225 - DNA, 19 bp, Artificial Sequence
  SARS-CoV-2A#25 T-Free sequence
ggacaacagcagacaaccc

SEQ ID NO: 226 - DNA, 13 bp, Artificial Sequence
  SARS-CoV-2A#24 T-Free sequence
acagagcaagggc

SEQ ID NO: 227 - DNA, 18 bp, Artificial Sequence
  SARS-CoV-2A#23 T-Free sequence
gcagaagaaacacgcaaa

SEQ ID NO: 228 - DNA, 13 bp, Artificial Sequence
  SARS-CoV-2A#22 T-Free sequence
gagaagcaagaaa

SEQ ID NO: 229 - DNA, 17 bp, Artificial Sequence
  SARS-CoV-2A#21 T-Free sequence
agaggaggcaaagacag

SEQ ID NO: 230 - DNA, 17 bp, Artificial Sequence
  SARS-CoV-2A#20 T-Free sequence
gaacagagaaaacaaga

SEQ ID NO: 231 - DNA, 12 bp, Artificial Sequence
  SARS-CoV-2A#19 T-Free sequence
aagcggacacaa

SEQ ID NO: 232 - DNA, 14 bp, Artificial Sequence
  SARS-CoV-2A#18 T-Free sequence
caacaagacggcag

SEQ ID NO: 233 - DNA, 20 bp, Artificial Sequence
  SARS-CoV-2A#17 T-Free sequence
gaagaagagcaagaagaaga

SEQ ID NO: 234 - DNA, 13 bp, Artificial Sequence
  SARS-CoV-2A#16 T-Free sequence
gaagaagaagagt

SEQ ID NO: 235 - DNA, 13 bp, Artificial Sequence
  SARS-CoV-2A#15 T-Free sequence
gcaccaacaaagg

SEQ ID NO: 236 - DNA, 16 bp, Artificial Sequence
  SARS-CoV-2A#14 T-Free sequence
caaagacacagaaaag

SEQ ID NO: 237 - DNA, 14 bp, Artificial Sequence
  SARS-CoV-2A#13 T-Free sequence
agagggagaaacac

SEQ ID NO: 238 - DNA, 18 bp, Artificial Sequence
  SARS-CoV-2A#12 T-Free sequence
caaaagccccaaaagaaa

SEQ ID NO: 239 - DNA, 14 bp, Artificial Sequence
  SARS-CoV-2A#11 T-Free sequence
agagggagaaacac

SEQ ID NO: 240 - DNA, 17 bp, Artificial Sequence
  SARS-CoV-2A#10 T-Free sequence
aaaagccccaaaagaaa

SEQ ID NO: 241 - DNA, 13 bp, Artificial Sequence
  SARS-CoV-2A#9 T-Free sequence
ccagagaagaaac

SEQ ID NO: 242 - DNA, 12 bp, Artificial Sequence
  SARS-CoV-2A#8 T-Free sequence
acagaaggccgc

SEQ ID NO: 243 - DNA, 14 bp, Artificial Sequence
  SARS-CoV-2A#7 T-Free sequence
acaaaaggaaaagc

SEQ ID NO: 244 - DNA, 14 bp, Artificial Sequence
  SARS-CoV-2A#6 T-Free sequence
ccaaaaagagaaag

SEQ ID NO: 245 - DNA, 13 bp, Artificial Sequence
  SARS-CoV-2A#5 T-Free sequence
ggcagacgggcga

SEQ ID NO: 246 - DNA, 13 bp, Artificial Sequence
  SARS-CoV-2A#4 T-Free sequence
gaaaagaaaaagc

SEQ ID NO: 247 - DNA, 14 bp, Artificial Sequence
  SARS-CoV-2A#3 T-Free sequence
ttaacggaggggca

SEQ ID NO: 248 - DNA, 17 bp, Artificial Sequence
  SARS-CoV-2A#2 T-Free sequence
caacgagaaaacacacg

SEQ ID NO: 249 - DNA, 13 bp, Artificial Sequence
  SARS-CoV-2A#1 T-Free sequence
gacaggacacgag

SEQ ID NO: 250 - DNA, 29903 bp, Artificial Sequence
  SARS-CoV2 isolate Wuhan-Hu-1 reverse complement
tttttttttttttttttttttttttttttttttgtcattctcctaagaagctattaaaatcacatggggatagcactactaaaattaattttacacattagggctcttccatataggcagctctccctagcattgttcactgtacactcgatcgtactccgcgtggcctcggtgaaaatgtggtggctctttcaagtcctccctaatgttacacactgattaaagattgctatgtgagattaaagttaactacatctacttgtgctatgtagttacgagaattcattctgcacaagagtagactatatatcgtaaacggaaaagcgaaaacgtttatatagcccatctgccttgtgtggtctgcatgagtttaggcctgagttgagtcagcactgctcatggattgttgcaattgtttggagaaatcatccaaatctgcagcaggaagaagagtcacagtttgctgtttcttctgtctctgcggtaaggcttgagtttcatcagccttcttctttttgtcctttttaggctctgttggtgggaatgttttgtatgcgtcaatatgcttattcagcaaaatgacttgatctttgaaatttggatctttgtcatccaatttgatggcacctgtgtaggtcaaccacgttcccgaaggtgtgacttccatgccaatgcgcgacattccgaagaacgctgaagcgctgggggcaaattgtgcaatttgcggccaatgtttgtaatcagttccttgtctgattagttcctggtccccaaaatttccttgggtttgttctggaccacgtctgccgaaagcttgtgttacattgtatgctttagtggcagtacgtttttgccgaggcttcttagaagcctcagcagcagatttcttagtgacagtttggccttgttgttgttggcctttaccagacattttgctctcaagctggttcaatctgtcaagcagcagcaaagcaagagcagcatcaccgccattgccagccattctagcaggagaagttcccctactgctgcctggagttgaatttcttgaactgttgcgactacgtgatgaggaacgagaagaggcttgactgccgcctctgctcccttctgcgtagaagccttttggcaatgttgttccttgaggaagttgtagcacgattgcagcattgttagcaggattgcgggtgccaatgtgatcttttggtgtattcaaggctccctcagttgcaacccatatgatgccgtctttgttagcaccatagggaagtccagcttctggcccagttcctaggtagtagaaataccatcttggactgagatctttcattttaccgtcaccaccacgaattcgtctggtagctcttcggtagtagccaatttggtcatctggactgctattggtgttaattggaacgccttgtcctcgagggaatttaaggtcttccttgccatgttgagtgagagcggtgaaccaagacgcagtattattgggtaaaccttggggccgacgttgttttgatcgcgccccactgcgttctccattctggttactgccagttgaatctgagggtccaccaaacgtaatgcggggtgcatttcgctgattttggggtccattatcagacattttagtttgttcgtttagatgaaatctaaaacaacacgaacgtcatgatactctaaaaagtcttcatagaacgaacaacgcactacaagactacccaatttaggttcctggcaattaattgtaaaaggtaaacaggaaactgtataattaccgatatcgatgtactgaatgggtgatttagaaccagcctcatccacgcacaattcaattaaaggtgctgattttctagctcctactctaatataccatttagaatagaagtgaataggacacgggtcatcaactacatatggttgatgttgagtacatgactgtaaactacattcttggtgaaatgcagctacagttgtgatgattcctaagaaaacaagaaatttcatgttcgtttaggcgtgacaagtttcattatgatcttgcagttcaagtgagaaccaaaagataataagcataattaaaacaaggaatagcagaaaggctaaaaagcacaaatagaagtcaattaatgaaagttcaatcattctgtctttcttttgagtgtgaagcaaagtgttataaacactattgccgcaacaataagaaaaattggagagtaaagttcttgaacttcctcttgtctgatgaacagtttaggtgaaactgatctggcacgtaactgatagacgtgttttacgccgtcaggacaagcaaaagcaaattgagtgctaaagcaagtcagtgcaaatttgttatcagctagaggatgaaatggtgaattgccctcgtatgttccagaagagcaaggttcttttaaaagtactgttgtacctctaacacactcttggtagtgataaagctcacaagtagcgagtgttatcagtgccaagaaaagaataattttcatgttcgtttaatcaatctccattggttgctcttcatctaattgagaatatttattctcagttagtgacttagataaatttttaattatgaggtttatgatgtaatcaagattccaaatggaaactttaaaagtcctcataataattagtaatatctctgctatagtaacctgaaagtcaacgagatgaaacatctgttgtcacttactgtacaagcaaagcaatattgtcactgctactggaatggtctgtgtttaatttatagttgccaatcctgtagcgactgtatgcagcaaaacctgagtcacctgctacacgctgcgaagctcccaatttgtaataagaaagcgttcgtgatgtagcaacagtgatttctttaggcaggtccttgatgtcacagcgtcctagatggtgtccagcaatacgaagatgtccacgaaggatcacagctccgattacgagttcactttctagaagcggtctggtcagaatagtgccatggagtggcacgttgagaagaatgttagtttctggattgaatgaccacatggaacgcgtacgcgcaaacagtctgaaagaagcaatgaagtagctgagccacatcaagcctacaagacaagccattgcgatagcaattccaccggtgatccaatttattctgtaaacagcagcaagcacaaaacaagctaaagttactggccataacagccagaggaaaattaacttaattatatacaaaaacctattcctgttggcataggcaaattgtagaagacaaatccatgtaaggaataggaaacctattactaggttccattgttcaaggagctttttaagctcttcaacggtaatagtaccgttggaatctgccatggctaaaattaaagttccaaacagaaaaactaatataatatttagttcgtttagaccagaagatcaggaactctagaagaattcagatttttaacacgagagtaaacgtaaaaagaaggttttacaagactcacgttaacaatattgcagcagtacgcacacaatcgaagcgcagtaaggatggctagtgtaactagcaagaataccacgaaagcaagaaaaagaagtacgctattaactattaacgtacctgtctcttccgaaacgaatgagtacataagttcgtactcatcagcttgtgcttacaaaggcacgctagtagtcgtcgtcggttcatcataaattggttccattactggattaacaactccggatgaaccgtcgattgtgtgaatttggacatgttcttcaggctcatcaacaattttattgtagatgaagaaggtaacatgttcaacaccagtgtctgtactcaattgagttgagtacagctggtaatagtctgaagtgaagtaactgtgtaatacaacacagtcttttactccagattcccatttttcagtataaccaccaatctggtagtcatgttcagaaataggacttgttgtgccatcacctgaagtaatgacaattgaagaagttacactattgtaaggtatacaatagtcgtaacaattagtatgccagcaaagaaaatagttggcatcataaagtaatgggtttttggaacggcatttccagcaaagccaaagcctcattattattcttacaaagtttatactctgcaagaagtagactaaagcataaagatagagaaaaggggcttcaaggccagcagcaacgagcaaaaggtgtgagtaaactgttacaaacaacaacagcaagttgcaaacaaagtgaacacccttggagagtgctagttgccatctctttttgagggttatgattttggaagcgctctgaaaaacagcaagaagtgcaacgccaacaataagccatccgaaagggagtgaggcttgtatcggtatcgttgcagtagcgcgaacaaaatctgaaggagtagcatccttgatttcaccttgcttcaaagttacagttccaattgtgaagattctcataaacaaatccataagttcgtttatgtgtaatgtaatttgactcctttgagcactggctcagagtcgtcttcatcaaatttgcagcaggatccacaagaacaacagcccttgagacaactacagcaactggtcatacagcaaagcataattgtcaccattactatggcaatcaagccagctataaaacctagccaaatgtaccatggccattttatatactgctcatactttccaagttcttggagatcgatgagagattcatttaaattcttggcaacctcattgaggcggtcaatttctttttgaatgtttacaactgaagcattaatgccagagatgtcacctaaatcaacatctggtgatgtatgattcttaaaatatttatctaactcctccttgaatgagtctaattcaggttgcaaaggatcataaactgtgttgttgacaattcctattacaacatcacagttaccagacacaaatgtgttgtctgtagtaatgatttgtggttcataaaaattcctttgtgttacaaaccagtgtgtgccatttgaaacaaagacaccttcacgaggaaagtgtgcttttccatcatgacaaatggcaggagcagttgtgaagttcttttcttgtgcagggacataagtcacatgcaagaagactacaccatgaggtgctgactgagggaaggacataagatgatagccctttccacaaaaatcaactctttttgattgtccaagtacacactctgacattttagtagcagcaagattagcagaagctctgatttctgcagctctaattaattgttgagtcacatatgtctgcaaactttgaagtctgcctgtgatcaacctatcaatttgcacttcagcctcaactttgtcaagacgtgaaaggatatcatttaaaacacttgaaattgcaccaaaattggagctaagttgtttaacaagcgtgtttaaagcttgtgcattttggttgaccacatcttgaagttttccaagtgcacttgctgtggaagaaagtgagtcttgaattttgccaatagcactattaaattggttggcaatcaatttttggttctcatagagaacattctgtgtaactccaataccattaaacctataagccatttgcatagcaaatggtatttgtaatgcagcacctgcaccaaaggtccaaccagaagtgattgtacccgctaacagtgcagaagtgtattgagcaatcatttcatctgtgagcaaaggtggcaaaacagtaaggccgttaaacttttgtgcacaaatgaggtctctagcagcaatatcaccaaggcaatcaccatattgtttgatgaagccagcatctgcaagtgtcactttgttgaaaagtagatcttcaataaatgacctcttgcttggttttgatggatctggtaatatttgtgaaaaattaaaaccaccaaaatctttaattggtggtgttttgtaaatttgtttgacttgtgcaaaaacttcttgggtgtttttgtcttgttcaacagctattccagttaaagcacggtttaattgtgtacaaaaactgccatattgcaacaaaagattgctgcattcagttgaatcaccacaaatgtacattgtacaatctactgatgtcttggtcatagacactggtagaatttctgtggtaacactaatagtaaaatttgtgggtatggcaatagagttattagagtaagcaactgaattttctgcaccaagtgacatagtgtaggcaatgatggattgactagctacactacgtgcccgccgaggagaattagtctgagtctgataactagcgcatatacctgcaccaatgggtatgtcacactcatatgagttgttgacatgttcagcccctattaaacagcctgcacgtgtttgaaaaacattagaacctgtagaataaacacgccaagtaggagtaagttgatctgcatgaatagcaacagggacttctgtgcagttaacatcctgataaagaacagcaacctggttagaagtatttgttcctggtgttataacactgacaccaccaaaagaacatggtgtaatgtcaagaatctcaagtgtctgtggatcacggacagcatcagtagtgtcagcaatgtctctgccaaattgttggaaaggcagaaactttttgttagactcagtaagaacacctgtgcctgttaaaccattgaagttgaaattgacacatttgtttttaaccaaattagtagactttttaggtccacaaacagttgctggtgcatgtagaagttcaaaagaaagtactactactctgtatggttggtaaccaacaccattagtgggttggaaaccatatgattgtaaaggaaagtaacaattaaaaccttcaacaccattacaaggtgtgctaccggcctgatagatttcagttgaaatatctctctcaaaaggtttgagattagacttcctaaacaatctatacaggtaattataattaccaccaaccttagaatcaagattgttagaattccaagctataacgcagcctgtaaaatcatctggtaatttataattataatcagcaatctttccagtttgccctggagcgatttgtctgacttcatcacctctaattacaaatgaatctgcatagacattagtaaagcagagatcatttaatttagtaggagacactccataacacttaaaagtggaaaatgatgcggaattatataggacagaataatcagcaacacagttgctgattctcttcctgttccaagcataaacagatgcaaatctggtggcgttaaaaacttcaccaaaagggcacaagtttgtaatattaggaaatctaacaatagattctgttggttggactctaaagttagaagtttgatagattcctttttctacagtgaaggatttcaacgtacactttgtttctgagagagggtcaagtgcacagtctacagcatctgtaatggttccattttcattatattttaatagaaaagtcctaggttgaagataacccacataataagctgcagcaccagctgtccaacctgaagaagaatcaccaggagtcaaataacttctatgtaaagcaagtaaagtttgaaacctagtgatgttaatacctattggcaaatctaccaatggttctaaagccgaaaaaccctgagggagatcacgcactaaattaataggcgtgtgcttagaatatattttaaaataaccatcaatattcttaaacacaaattccctaagatttttgaaattaccctgttttccttcaaggtccataagaaaaggctgagagacatattcaaaagtgcaattattcgcactagaataaactctgaactcactttccatccaacttttgttgtttttgtggtaataaacacccaaaaatggatcattacaaaattgaaattcacagactttaataacaacattagtagcgttattaacaataagtagggactgggtcttcgaatctaaagtagtaccaaaaatccagcctcttattatgttagacttctcagtggaagcaaaataaacaccatcattaaatggtaggacagggttatcaaacctcttagtaccattggtcccagagacatgtatagcatggaaccaagtaacattggaaaagaaaggtaagaacaagtcctgagttgaatgtaaaactgaggatctgaaaactttgtcagggtaataaacaccacgtgtgaaagaattagtgtatgcagggggtaattgagttctggttgtaagattaacacactgactagagactagtggcaataaaacaagaaaaacaaacattgttcgtttagttgttaacaagaacatcactagaaataacaactctgttgttttctctaattataagtctacctttactaagaagagataaaatcatatcattgatttgaccttcttttaaagacataacagcagtaccccttaatttaaggggaaatttactcatgtcaaataaagaataggaagacaactgaattggatttgtattcctccaaaatatgtaatttgcatgcatgacataaccatctatttgttcgcgtggtttgccaagataattacatccaattaaaaatgcttcagatgatgacgcattcacattagtaacaaaggctgtccaccatgcgaagtgtcccatgagcttataaagatcagcattccaagaatgttctgttatctttatagccacggaacctccaagagctagcttttgttgtataaacccacaaatgtaagtgaaaaaaccctctttagagtcattttcttttgtaacatttttagtcttagggtcgtacatatcactaataatgagatcccatttattagctgtatgtacagttgcacaatcaccaatcaaagttgaatctgcatcagagacaaagtcattaagatctgaatcgacaagcagcgtacccgtaggcaaccactgtcttaaaacagctgtacctggtgcaactcctttatcagaaccagcaccaaaatgtataactctcatattatagggtacagctaatgttaatgtgtttaaatattgacacagttgagtatattttgcgacattcatcattatgcctttaggtaatgttgcactatcaccataattttgaaggtcacacttttctaatagcattctttgcattttgtaaagattaggcatagcaacacccggttgccacgcttgactagattgtaattttgggtaaaatgtttctacatggccatctttacaccaaagcataaatgaaatttctgtatagtcaatagtcactttgacaaccttagaaactacagataaatcttgggattttattatttcaacaaaatcatcaagtaataaatcaataacagaacacacacacttagatgaacctgtttgcgcatctgttatgaaatagtttttaactgtactgtccataggaataaaatcttctaattcaaaaggtgattccttaaaacgtttagctagtccaatcagtagatgtaaaccacctaactgactatgactaaaatctccataaacgatatgttcgaaggcatagccttctaatttataccgttcaatgaattcatccatagctaattctaagaaatcaatttccatttgactcctgggtttaaattcttgtaaatttctactctgagtaaagtaagtttcaggtaattgttggacaacaccatcaactttcttataataattgaactgtgtttttacggcttctccaattaatgtgactccattaagactagcttgtttgggacctacagatggttgtaaacctttaacactaccttctgtaataagaacaccattacgggcatttctaaataagtctacttgaccatcaactctaccatcaaaaaagacagtgagtggtgcacaaatcgtttcagttggtttcttggctatgtcagtcatagaacaaacaccaatagtagatatatgtgctggagcatctcttttgtagtcccagatcacagtattagcagcaatgtccacacccaaattattgagtattttcacctctggtactggtttaatgttgcgcttagcccaaagctcaaatgctacattaacaggtaatgttgttttattttcaaacaattctacatcaacaccatcaacttttgtgtaaacagtgttattaatgatagaaactggtacttcaccctgttgtccatcaaagtgtcccttatttacaacattaaaagccacattttctaaactctgaagtcttgtaaaagtgttccagaggttataagtatcaaattgtttgtaaacccacaagctaaagccagctgagatcatcatgttataagcatcgagatacaatctgtactcattagcatgatgtctacagacagcaccacctaaattgcaacgtgttatacacgtagcagactttagtggtacataatctatatctgacactacttgttttccatgagactcacatggactgtcagagtaatagaaaaatggtaattgttttaaattaacaaaagcacttttatcaaaagctggtgtgtggaatgcatgtttatttacatacaaactgccaccatcacaaccaggcaagttaaggttagatagcactctagtgtcaaatctacaaacaatggaattagcaggatatctatcgacattgcaattccaaaataggcatacaccatctgtgaatttgtcagaatgtgtggcataagaatagaataattcttctattttataagctttgtcactacaaggctgtgcatcatagaacttccattctacatcagcttgaggtacacacttaatagctttagggttaccaatgtcgtgaagaactgggaatttgtctgctaataatgcagctttaacaaccatgtgttgaacctttctacaagccgcattaatcttcagttcatcaccaattataggatattcaatagtccagtcaacacgcttaacaaagcactcgtggacagctagacacctagtcatgattgcatcacaactagctacatgtgcattaccatggacttgacaatacagatcatggttgctttgtaggttacctgtaaaaccccattgttgaacatcaatcataaacggattatagacgtaatcaaatccaatagaatgatgccaacaggcataagtgtctgaagcagtggaaaagcatgtggcacgtctatcacatagacaacaggtgcgctcaggtcctattttcacaaaatacttcatagatgtcaactcaaagccatgtgcccataagacaaatacgactctgtcagagagatttttaagtgtgtcacttaacatttgtacaatctttatacgcactacattccaaggaagtcctttgtacataagtggtatgaggtgtttaaattgatctccaggcggtggtttagcactaactctggaaaaatctgtattattaggtgtatcaacataacctgtaggtacagcaactaggttaacacctgtagaaaaacctagctgtaaaggtaaattggtaccaacagcttctctagtagcatgacacccctcgacatcgaagccaatccatgcacgtacatgtcttatagcttcttcgcgggtgataaacatgttagggtaaccattaacttgataattcattttaaaacccatcatagagatgagtcttctataggtcatgtccttaggtatgccaggtatgtcaacacataaaccttcagttttgaatttagtgtcaacactgaggtgtgtaggtgcctgtgtaggatgtaacccagtgattaccttactacaatctttaaagagtcctgttacattttcagcttgtaaagttgccacattcctacgtggaatttcaagacttgtaaattgcaacttgtcataaaggtctctatcagacattatgcaaagtatgcctacttttgctctggtaatagcaacattaaatctgtttacattacaagagtgagctgtttcagtggtttgagtgaatatgacatagtcatattctgagccctgtgatgaatcaacagtttgagttggtagtcccaaaatctttgaggctacagcattctgtgaattataaggtgaaataaagacagcttttctccaagcagggttacgtgtaaggaattctcttaccacgcctatttgtggcctgttaattgcagatgaaacatcatgcgtgataacacccttataaaacattttaaagcattgagctgatttgtctttatgtgctttaagcttattatcataaaccaaagcactcacagtgtcaacaatttcagcaggacaacgccgacaagttccgaggaacatgtctggacctatagttttcataagtctacacactgaattgaaatattctggttctagtgtgcccttagttagcaatgtgcgtggtgcaggtaattgagcagggtcgccaatgtacacatagtgcttagcacgtaatctggcattgacaacactcaaatcataatttgtggccattgaaatttcatcaaagacaactatatctgctgtcgtctcaggcaatgcatttacagtacaaaagacatactgttctaatgttgaattcactttgaatttatcaaaacactctacacgagcacgtgcaggtataattctactacatttatctataggcaaatattttaatgccttctcacatagtgcatcaacagcggcatgagagcaagctgtatacactatgcgagcagaagggtagtagagagctaggccaatagcaaaatgactcttaccagtaccaggtggtccctggagtgtagaatacttttgcataccaaccttttgataatttgcaacattgctagaaaactcatctgagatattgagtgttgggtataagccagtaattctaacatagtgctcttgtggcactagtgtaggtgcacttaatggcattactgtatgtgatgtcagcacaaaataatcaccaacatttaatttgtaagttgttgtacctcggtaaacaacagcatcaccatagtcacctttttcaaaggtgtactctcctatttgtactttactgtttttagttacacgataaccagtaaagacataatttcggttaagtggtggtctaggtttaccaacttcccatgaaagatgtaattctctgtcagacagcacttcacgtacagtagcaataccataagacagtttaaatgtctcctcagtagctttgagcgtttctgctgcaaaaagcttgagtctttcagtacaggtgttagctaaaatgtaatcaccagcatttgtccagtcacatgttgcaattgcattaaagtcagtaacattatcgctaccaacacatgtatttttatataaaccaaaaacttgtccattagcacacaatggaaaactaatgggtggtttatgtgatttacaataatagctcatacctcctaagtaaagttgagtcacatctgtgacatcacaacctggagcattgcaaacatacggattaacagacaagactaatttatgtgatgttgatatgacatggtcgtaacagcatttacaacataagaatggtctacgtatgcaagcaccacatcttaatgaagtctgtgaattgcaaagaacacaagccccaacagcctgtaagactgtatgcggtgtgtacatagcctcataaaactcaggttcccaataccttgaagtgttatcattagtaagcataacagaatacatgtctaacatgtgtcctgttaactcatcatgtagctttcttatgtattgtaagtacaaatgaaagacatcagcatactcctgattaggatgtttagtaagtgggtaagcatctatagctaaagacacgaaccgttcaatcataagtgtaccatctgtttttacgatatcatctacaaaacagccggcccctaggattcttgatggatctgggtaaggaaggtacacataatcatcaccctgtttaactagcattgtatgttgagagcaaaattcatgaggtcctttagtaaggtcagtctcagtccaacattttgcttcagacataaaaacattgttttgataataaagaactgacttaaagttctttatgctagccactagaccttgagatgcataagtgctattgaaacacacaacagcatcgtcagagagtatcatcattgagaaatgtttacgcaaatatgcgtaaaactcattcacaaagtctgtgtcaacatctctatttctatagagacactcataaagtctgtgttgtaaattgcggacatacttatcggcaattttgttaccatcagtagataaaagtgcattaacattggccgtgacagcttgacaaatgttaaaaacactattagcataagcagttgtggcatctcctgatgaggttccacctggtttaacatatagtgaaccgccacacatgaccatttcactcaatacttgagcacactcattagctaatctatagaaacggtgtgacaagctacaacacgttgtatgtttgcgagcaagaacaagtgaggccataattctaagcatgttaggcatggctctatcacatttaggataatcccaacccataaggtgagggttttctacatcactataaacagtttttaacatgttgtgccaaccaccatagaatttgcttgttccaattactacagtagctcctctagtggcggctattgatttcaataatttttgatgaaactgtctattggtcatagtactacagatagagacaccagctacggtgcgagctctattctttgcactaatggcatacttaagattcatttgagttatagtagggatgacattacgttttgtatatgcgaaaagtgcatcttgatcctcataactcattgaatcataataaagtctagccttaccccatttattaaatggaaaaccagctgatttgtctaggttgttgacgatgacttggttagcattaatacagccaccatcgtaacaatcaaagtacttatcaacaacttcaactacaaatagtagttgtctgatatcacacattgttggtagattataacgatagtagtcataatcgctgatagcagcattaccatcctgagcaaagaagaagtgttttaattcaacagaacttccttccttaaagaaacccttagacacagcaaagtcatagaagtctttgttaaaattaccgggtttgacagtttgaaaagcaacattgttagtaagtgcagctactgaaaagcacgtagtgcgtttatctagtaatagattaccagaagcagcgtgcatagcagggtcagcagcatacacaagtaattccttaaaactaagtctagagctatgtaagtttacatcctgattatgtacaacacctagctctctgaagtggtatccagttgaaactacaaatggaacaccatcaacaaatatttttctcactagtggtccaaaacttgtaggtgggaacactgtagagaataaaacattaaagtttgcacaatgcagaatgcatctgtcatccaaacagttaacacaatttgggtggtatgtctgatcccaatatttaaaataacggtcaaagagttttaacctctcttccgtgaagtcatattttaacaaatcccacttaatgtaaggctttgttaagtcagtgtcaacatgtgactctgcagttaaagccctggtcaaggttaatataggcattaacaatgaataataagaatctacaacaggaactccactacctggcgtggtttgtatgaaatcaccgaaatcataccagttaccattgagatcttgattatctaatgtcagtacaccaacaataccagcatttcgcatggcatcacagaattgtactgtttttaacaaagcttggcgtacacgttcacctaagttggcgtatacgcgtaatatatctgggttttctacaaaatcataccagtcctttttattgaaataatcatcatcacaacaattgtatgtgacaagtatttcttttaatgtgtcacaattaccttcatcaaaatgccttaaagcatagacgaggtctgccattgtgtatttagtaagacgttgacgtgatatatgtggtaccatgtcaccgtctattctaaacttaaagaagtcatgtttagcaacagctggacaatccttaagtaaattataaattgtttcttcatgttggtagttagagaaagtgtgtctcttaactacaaagtaagaatcaattaaattgtcatcttcgtccttttcttggaagcgacaacaattagtttttaggaatttagcaaaaccagctactttatcattgtagatgtcaaaagccctgtatacgacatcagtactagtgcctgtgccgcacggtgtaagacgggctgcacttacaccgcaaacccgtttaaaaacgattgtgcatcagctgactgaagcatgggttcgcggagttgatcacaactacagccataacctttccacataccgcagacggtacagactgtgtttttaagtgtaaaacccacagggtcattagcacaagttgtaggtatttgtacatacttaccttttaagtcacaaaatcctttaggatttggatgatctatgtggcaacggcagtacagacaacacgatgcaccaccaaaggattcttgatccatattggcttccggtgtaactgttattgcctgaccagtaccagtgtgtgtacacaacatcttaacacaattagtgattggttgtcccccactagctagataatctttgtaagctttagcagcatctacagcaaaagcacagaaagataatacagttgaattggcaggcacttctgttgcattaccagcttgtagacgtactgtggcagctaaactaccaagtaccatacctctatttaggttgtttaatcctttaataaagtataaatacttcactttaggacctttaggtgtgtctgtaacaaacctacaaggtggttccagttctgtatagatagtaccagttccatcactcttagggaatctagcccatttcaaatcctgtaaatcggataacagtgcaagtacaaacctacctccctttgttgtgttgtagtaagctaacgcattgtcatcagtgcaagcagtttgtgtagtaccggcagcacaagacatctgtcgtagtgcaacaggactaagctcattattctgtaatttgacagcagaattggcccttaaagctgttacaataagaggccatgctaaattaggtgaattgtccatactaatttcactaagttgaacaattttactatctgcatctacaacctgttggatttcccacaatgctgatgcataagtaaatgttgtaccatcacacgtatttttatatgtgttatagtctggtatgacaaccattagtttggctgctgttgtaagaggtattatgttcaagggaacacaaccatctcttgcattgttgataatgttgttgagtgcatcattatccaactttctaagcatagtgaaaagcattgtctgcatagcactagtaacttttgccctcttgtcctcagatctagcctgtttatacatttgggtcatagcttgatcagccatcttttccaacttacgttgcatggctgcatcacggtcaaattcagatttagccacattcaaagacttcttcaactttttaagaacaacttcagaatcaccattagcaacagcctgctcataagcttcttgagcagtagcaaaagctgcatatgatggaagggaactaaactctgaggctatagcttgtaaggttgccctgttgtccagcatttcttcacaaagcttgtttatgtctacagcaccctgcatggaaagcaaaacagaaagtagtgaaaccattttttcaaaggcttcagtagtatctttagctaagagaatgtcattgtgtaactggacacattgagcccacaatttagatgatgattctactctgagttgttgcaaaactgagagtaagactactgatgtgcactttacatctgacattttagactgtacagtggctactttgatacaaggtttgccaccaacacccaacaatttaatgttgagtttgaaggcatctatgctattcttgggtgggagtagtccctgtgaattcatatatctaaactcctgtgtagaaactaagtaatcataaacaccaagagtcagtctaaagtagcggttgagtaaacaaaagaggccaaagtaacaagtacaaaaatagcctaagaaacaataaactagcattatacactgaagtgtattaccagttatgaagaaaatagggcaatactcaacacacataaaaacaatacctctggccaaaaacatgacagttgtaactacacctgagtagttagaagtaacagagattataagagcccacatggaaatggcttgatctaaagcattaccataataaactttataaacgagtgtcaagacattcataagtgtccacactctcctagcaccatcatcatacacagttcttgctgtcataaggattagtaacactacagctgatgcatacataacacagtcttttagcttaaaaccagacaaactagtatcaaccatatccaaccatgtcataatacgcatcacccaactagcaggcatatagaccatattaaaataagctacagtggcaagagaaggtaacaaaaacaaacagagaaatgcatgcttatgtttgacaaacatcattgcaaaagcagacatagcaataatacccatagcaaaaggtaaaaaggcattttcatacaaaaaaaagaacaaagaccattgagtactctggactaaaactaaaagtgaagtcaaaattgtgagtaacaaccagtggtgtgtacccttgattgttcttttcactgcactttggaaagtaacacctgagcattgtctaacaacatcaaaaggtgtaaattcatcttctaataaagcactacccaatatggtacgtccattcataccattttgcagtaattcttttaatgaagcacacatatctaaaacggcaattccagtttgagcagaaagaggtcctagtatgtcaacatggtcttgtgttagaggttcataattgtacttcatagccacaaggttaaagtcattaagagttgtggtaaatcgattgagaaaccacctgtctccatttataacagcagcgtacaaccaagctaaaacattaactgtaatagttgtgtccgtaccagctgcttgtgctgtttgcctgtcaacaaaaggtccataaaagttaccttctaagtctgtgccagcatgaactccagttggtaattccatatggtgcatgtaacaaaaagagacacagtcataatctatgttaaaaccaacactaccacatgaaccattaaggaatgaacccttaatagtgaaattgggcctcatagcacattggtaaacaccagatggtgaaccattgtaacaagctaacactgaaaaagtctgtcctggttgaatgcgaacaaacttatacttaggtgtcttaggattggctgtatcaaccttaagcttaagtacacaattttgcatagaatgtccaataaccctgagttgaacattaccagcctgtaccaagaaattatgattagacttacgaatgagtaaatcttcataattagggttaagcatgtcttcagaggtgcagatcacatgtcttggacagtaaactacgtcatcaagccaaagaccgttaagtgtagttgtaccacaagttacttgtaccatacaaccctcaactttaccagatgggaatgccatttttctaaaaccactctgcaaaacagctgaggtgatagaggtttgtggtggttggtaaagaacatcagaacctgagttactgaagtcattgagagcctttgcgagatgacaacaagcagcttctctgtagctagttgtatccattgctccactaaaatacttgtacttattataaagagctaagtatctattatattgcgtaagaggtaatagcacatcactacgcaactttagatacatttctttatttaacaaaaaggtgcacagcgcagcttcttcaaaagtactaaaggaaacaccattaaagactacacgtctctttaggtaattactaaagaaccaatagaaatgctttgtggaaatacaaatgatataagcaattgttatccagaaaggtactaaaggtgtgaacataaccatccactgaatatgtgctaaaaaagaaacatcattagtaagataaaatgtcaagtacaagtaaataacagaataaacaccaggtaagaatgagtaaactggtgttaaacagagtacagtgaatgacataaggaatagtaaagtattaaaggcaactacatgactgtattcaccaaaagctcttctaaacctcataaaatagtaggcaaggcatgttactacgatagctacaataccaccagctactatagatgctgatatgtccaaagcaccaataggttgaattagtggtgtaaacatattagtaagtaaatttacagcatctacaccacagaaaactcctggtaaagatctgtaataatcattgttaagtacccatctaccactagtagatacacaaacaccagcttctgatctttcacaagtgccgtgcctacagtactcagaatcaaaagttgttaccactctaacagaaccttcaaggtaggtgttaggaaattgaataatagagccatccatgagcacataacgtgtgtcagggcgtaaactttcataagcaacagaaccttctagtacattggtatcataacaatatggtactggcttaccagaagcatctttaaaaattgtacattcagcagccaaaacacaagctgatgttgcaaagtcagtgtactctataagttttgatggtgtgtaacagatgttaccaactgcactaaaaactctaggtaagaaatgcaaaaagtcaccattagttgtgcgtaatatcgtgccaggcaaaccaggcacgacaaaacccacttctcttgttatgactgcagcaatcaatgggcaagctttgtcattagtataactaccaccacgctggctaaaccatgtgtcaaaatcagcatgtttgttagcaaaacaagtatctgtagatgctatgtcacgagtgacaccaccatcaatagccttgtatcctatgatttcacttgaaaagtcagtatgtttagacatgacatgaacaggtgttattaaatagaaaatagcagcaacaaaaaggaacacaagtgtaactttaattaactgcttcaaccaattattaacaattttaccacccttaagtgctatctttgttgttacaacattaacaacttgtctagtagttgcacatgtcaacttaaaaggtaagttattctttttagcagcactacgtatttgttttcgtagttgttcagacaatgacatgaaatctttaacgttccatatcaaagcaatgttgtgactttttgctacctgcgcattaatatgacgcgcactacagtcaatacaagcaccaaggtcacggggtgtcatgttttcaactttgttataggtgagcatatagttattacaactatcgccagtaacttctatgtcagattgatgtgacaatttaagacattcaacaacatctttagtttctacatctgaatcaacaaacccttgccgagctgctgaaataaaagtagataagacattgtctaaggacacattctttgcaagttcagcttctgcagttgcaactagtgttttgagtttttccattggtacgttaaaagttgatgaaaacgtattaacgtaagcatcaaacattttaactgcaacttccgcactatcaccaacatcagacactaatgcctgatctagtaacagtataggttgacacataagctgactgtagtaaacagacgctgattttgcagatgattcttcacattttgatttaccatcaaaaactataacattaataggcaatgaacctttagtgttattagctctcaggttgtctaagttaacaaaatgagagagagaatgtctttcataagtcttttgaccagctttatcaaagtaaagatggatggaaccattcttcactgtaacactatcaacgatgtaagaagactggtcagtaggatttattggtcttttaaactgtagtgacaagtctctcgcaacttcatcactaataaatgtactaccagcacagaatgtatcacaattaacacaattccaattgtgtagtttgcaaaagcctttacctccattagcatagacataaaaggaccttctaacaccattaacaatagttgtacattcgactcttgttgctctattacgtttgtaacacatcatacaagttgatgaattacaaccgtctacaacatgcacataacttttccatacataataaaatgatgcaaagaagatgtacattctaaccatagctgaaatcggggccatttgtacaagattaattattaaccacataagccaagaattactaataaaatgtactgcaaaatagctgaaaaacaattgcatgattgcagccaatccaagtacatagaaaaacctagtgaaaagaatatatgccaaaaaccactctgcaactaagccaaaagcagttaaatcccatttaaaagatgaaatggtaatttgtatagtttctaaagaaggataggtgtctaaagaatctaaaccactaagacaaacactacaaggtatagaaccagtacagtaggttgcaatagtgacattagtagagttcaaatagccttctctgtaaccagtacagtaagaaggcatgcctaaattagacattaaaacacctaaagcagcggttgagtagattaaagaacctaggcaaacacttaatagtaaaaaccaaattataatatttatcagtttagaaaaattaggtgacttcaaataattaaatgaagcctctagacaaaatttaccgacactcttaacagtattctttgctatagtagtcggcatagatgctttaattctagaatttgtacttctagtaaaagtacacaattgtagcaataaagtaaagaaataaggcatataattagtacaaacacggtttaaacaccgtgtaactatgttagtagttgtactaacaactttgttaagaaaaggcttagcataattagctatagtatcccaagggacactattaacagcagctaaaccatgagtagcaagggttttcaaacctaatactctagataattcattaggtttcttaatagtaagactagaattgtctacataagcagccattagatctgtgtggccaacctcttctgtaatttttaaactattatttgctggtttaagtataatgtctcctacaacttcggtagttttcacattacactcaagaacgtctttctgtatggtaggattttccactacttcttcagagactggttttagatcttcgcaggcaagattatccattccctgcgcgtcctctgacttcagtacatcaaacgaatttgatgtttcaactggttttgtgctccaaagacaacgtatacaccaggtatttggtttatacgtggctttattagttgcattgttaacatgccaaacaataggtttatgtaacaatttagctcctttcttaaaagagggtgtgtagtgtttataatcaatagccaccacatcaccatttaagtcagggaaaaatgtaactttaagctctcttgaagcaggtttcttataaccagttaactggtttaaatcatcagcaaatttgatattatcacatacaaacttaaaattatcgaagcttgcgtttggatatggttggtttggtacaagatcaattggttgctctgtgaaataagaattgtctttcttataataattgtccaacttagggtcaatttctgtacaaacaacaccatccaatttataagtaactggttttatggttgttgtgtaactgttttctttgtagaaaacatccgtaataggacctttgtattctgaggactttgtaagtaaagcaccgtctatgcaatacaaagtttctttagaagttatatgtttatagtgaccacactggtaattaccagtgtactcactagcacaagtaaatgtaccatgcttaagttcatactgagcaggtggtgctgacatcataacaaaaggtgactcctgttgtactagatattttgtagcttgtttaccacacgtacaaggtatctgaacacctttcttaaattgttcataagaaagtgtgcccatgtacataacagcttctacacccttaagggttgtctgctgttgtccacaagttttacacaccacgttcaagactcttttgcaagaatctaaattggcatgttgaaacaagtaactcattgtttctctaacatcacctaactcacctactgtcttattacagtaggctaagataagtgcacaaaagttagcagcttcaccagcccttgctctgtaataagcatcttgtagagcaggtggattaaacttcaactctatttgttggagtgttaacaatgcagtggcaagataacagttgttatctgcccatttaatagaagttaaaccattaacttgtgggtatttccactttttagtgtgatttaatgctgacatgtacctacccagaaaactaggatcagttgtgtggtagtactcaaaagcctcaacacgtagagtgtcatcattaggtaaaacataaaatgttttaccttcatgtgaattatgaggttttattttagtaacatcagctccatccaaataagttggaccaaactgttgtccatatgtcattgacatgtccacaacttgcgtgtggaggttaatgttgtctactgttgtaaacaccttaatagtcctcacttctctcaaagaaagaagtgtcttaagattgtcaaaggtgataacttcaccatctaggtggaatgtggtaggattactagtgtaatatacacttttatcacctctcttaagaaattctatacctagttgtgtagattgtccagaataggaccaatctttataggaaccagcaagtgagatggtttcaataaaatgttcttcaggtgttttagaagaagaagtaagataaccattatacgctgtaacagcatcaggtgaagaaacagaaactgtagctggcactttgagagatctcatataccgagcagcttcttccaaatttaagccatgtgttacatagccaagtggcattgtaacaagagtttcatttagatcgttaagtgtgttgataagtgacgctacagttgttttactggtgtaaaagtaaaatctagcaccataatcaaccacaccctcttgtattttaatacccttatatttacgctgtatagttgaaactatggctttagtttccacacagacaggcattaatttgcgtgtttcttctgcatgtgcaagcatttctcgcaaattccaagaaacagttccaagaatttcttgcttctcattagagataatagatggtagaatgtaaaaggcacttttacactttttaagcactgtctttgcctcctctacagtgtaaccatttaaaccctgacccgggtaagtggttatataattgtctgttggcacttttctcaaagctttcgctagcatttcagtagtgccaccagcctttttagtaggtataaccacagcagttaaaacaccctcttgaacaacatcacccactatatatggagcatctttctttaagaaagtgatgtcaatgtcactaacaagagtggcagaatctggatgaagattgccattaatgtcaatataaagtaacaagttttctgtgaggaacttagtttcttccagagttgttgtaacttcttcaacacaagctttgattttcttatcatcttgttttctctgttcaactgaaggtttactttcagttataaatggcttaacttcctctttaggaatctcagcgatcttttgttcaacttgcttttcactcttcatttccaaaaagcttgaaacaagtttgtcatagagatttttatcaaagacagctaagtagacatttgtgcgaacagtatctacacaaactcttaaagaatgtatagggtcagcaccaaaaataccagctgataataatggtgcaagtagaacttcgtgctgattaaaattttcataagcactcttaagaagttgaatgtcttcacctttgttaacatttgggccgacaacatgaagacagtgtttagcaagattgtgtccgcttaaaacacaactaccacccactttaagtggtccattagtagctatgtaatcatcagattcaacttgcatggcattgttagtagccttatttaaggctcctgcaacacctcctccatgtttaaggtaaacattggctgcattaacaaccactgttggttttacctttttagcttcttccacaatgtctgcatttttaatgtatacattgtcagtaagttttaaataaccactaaaactattcacttcaatagtctgaacaactggtgtaagttccatctctaattgaggttgaacctcaacaattgtttgaatagtagttgtctgattgtcctcactgccgtcttgttgaccaacagtttgttgactatcatcatctaaccaatcttcttcttgctcttcttcaggttgaagagcagcagaagtggcaccaaattccaaaggtttaccttggtaatcatcttcagtaccatactcatattgagttgatggctcaaactcttcttcttcacaatcaccttcttcttcatcctcatctggagggtagaaagaacaatacatatgtgaagccaatttaaactcaccagactcatcaaataagtagtatgtagccatactccactcatctaaatcaatgcccagtggtgtaagtaattcagatactggttgcaaagtttttatgacagcatctgccacaacacaggcgaactcatttacttctgtaccgagttcaactgtataggcagagcacttctcattaagtactttatcaatcctttcatcaagttcaaaagtgatattcacactcttgtaaccttgcacttctatcacagtgtcatcaccaaaagtaacctttgttggtgcaccgcctttgagtgtgaaggtattgtttgttaccatcatattaggtgcaagggcacagtacttttctgtgtctttgatttcgagcaacataagcccgttaatacaaactggtgtaccaaccaatggagcttcaacagcttcactagtaggttgttctaatggttgtaaatcaccagttttcaagacaacttcctctgttaacacttctgtgggaagtgtttctccctctaagaagataatttcttttggggcttttagaggcatgagtaggccagtttcttctctggatttaacacactttctgtacaatccctttgagtgcgtgacaaatgtttcacctaaattcaaggctttaagtttagctccaccaataatgatagagtcagcacacaaagccaaaaatttatttacaagcttaaagaatgtctgaacactctccttaatttcctttgcacaggtgacaatttgtccaccgacaatttcacaagcacaggttgagataaatttaacaatttcccaaccgtctctaagaaactctacaccttccttaaacttctcttcaagccaatcaaggacgggtttgagtttttcataaacagtgccaaagatgttagttagccactgcgaagtcaactgaacaacaccacctgtaatgtaggccattacaactagattgttagtagccaaatcagatgtgaacatcatagcatcaatgagtctcagtgaatactgtgaaattccatctagtattgttatagcggccttctgtaaaacacgcacagaattttgagcagtttcaagagtgcgggagaaaattgatcgtacaacacgagcagcctctgatgcaaatgcataaagaggactcagtattgatttctgttcaccaatattccaggcaccttttttagcttttccttttgtaactttaaaattaccacaggattcaacaatttgtttgaatgctttataatccaaacctttcacagtttccacaaaagcacttgtggaagcagaaaaagatgccaaaataatggcgatctcttcattaagtttaaagtcaccaacaatattgatgttgactttctctttttggagtatttcaagaaggttgtcattaagaccttcggaaccttctccaacaacacctgtatggttacaacctatgttagcgctagcacgtggaacccaataggcacacttgttatggcaaccaacataagagaacacacagcctccaaaggcaatagtgcgaccacccttacgaagaatggttttcaagccagattcattatggtattcggcaagactatgctcaggtcctacttctgaattgtgacatgctggacaataaattttaacaacagcattttggggtaagtaaccacaagtagtggcaccttctttagtcaaattctcagtgccacaaaattcgcaagtggctttaacaaaatcgcccgtctgccatgaagtttcaccacaatgatcacacttcatgagagttgaaaggcacatttggttgcattcatttggtgacgcaactggatagacagatcgaattctacccataaagccatcaagctttttcttttcaacccttggttgaatagtcttgattatggaatttaagggaaatacaaaatttggacattccccattgaaggtgtcaaatttctttgccaatttaatttcaaaaggtgtctgcaattcatagctcttttcagaacgttccgtgtaccaagcaatttcatgctcatgttcacggcagcagtatacacccctcttagtgtcaataaagtccagttgttcggacaaagtgcatgaagctttaccagcacgtgctagaaggtctttaatgcactcaagagggtagccatcagggccacagaagttgttatcgacatagcgagtgtatgcccctccgttaagctcacgcatgagttcacgggtaacaccactgctatgtttagtgttccagttttcttgaaaatcttcataaggatcagtgccaagctcgtcgcctaagtcaaatgactttagatcggcgccgtaactatggccaccagctcctttattaccgttcttacgaagaagaaccttgcggtaagccactggtatttcgcccacatgagggacaaggacaccaagtgtctcaccactacgaccgtactgaatgccttcgagttctgctaccagctcaaccataacatgaccatgaggtgcagttcgagcatccgaacgtttgatgaacacatagggctgttcaagttgaggcaaaacgcctttttcaacttctactaagccacaagtgccatctttaagatgttgacgtgcctctgataagacctcctccacggagtctccaaagccacgtacgagcacgtcgcgaacctgtaaaacaggcaaactgagttggacgtgtgttttctcgttgaaaccagggacaaggctctccatcttacctttcggtcacacccggacgaaacctagatgtgctgatgatcggctgcaacacggacgaaaccgtaagcagcctgcagaagatagacgagttactcgtgtcctgtcaacgacagtaattagttattaattatactgcgtgagtgcactaagcatgcagccgagtgacagccacacagattttaaagttcgtttagagaacagatctacaagagatcgaaagttggttggtttgttacctgggaaggtataaacctttaat

SEQ ID NO: 251 - DNA, 19 bp, Artificial Sequence
  HCV229E1 ID-Oligo
gtggaaaaagttcaatcca

SEQ ID NO: 252 - DNA, 20 bp, Artificial Sequence
  HCV229E2  ID-Oligo
caaaagaaacagggttaaca

SEQ ID NO: 253 - DNA, 20 bp, Artificial Sequence
  HCV229E3  ID-Oligo
aactcaaaattggtgttaaa

SEQ ID NO: 254 - DNA, 20 bp, Artificial Sequence
  HCV229E4  ID-Oligo
gttgaacattattatctaaa

SEQ ID NO: 255 - DNA, 22 bp, Artificial Sequence
  HCV229E5  ID-Oligo
aagactacgttttaaaacaaca

SEQ ID NO: 256 - DNA, 18 bp, Artificial Sequence
  HCV229E6  ID-Oligo
gcatgccaaacaatagga

SEQ ID NO: 257 - DNA, 17 bp, Artificial Sequence
  HCV229E7  ID-Oligo
gcaacagcattttcata

SEQ ID NO: 258 - DNA, 23 bp, Artificial Sequence
  HCV229E8  ID-Oligo
caaaatcagaggccaaacaagta

SEQ ID NO: 259 - DNA, 16 bp, Artificial Sequence
  HCV229E9  ID-Oligo
gcctccatcaccttca

SEQ ID NO: 260 - DNA, 19 bp, Artificial Sequence
  HCV229E10  ID-Oligo
ctttacacaattgccaaca

SEQ ID NO: 261 - DNA, 19 bp, Artificial Sequence
  HCV229E11  ID-Oligo
ctttacacaattgccaaca

SEQ ID NO: 262 - DNA, 19 bp, Artificial Sequence
  HCV229E12  ID-Oligo
aaacagaattacggtttaa

SEQ ID NO: 263 - DNA, 18 bp, Artificial Sequence
  HCV229E13  ID-Oligo
cttgtaaatggtagaata

SEQ ID NO: 264 - DNA, 20 bp, Artificial Sequence
  HCV229E14  ID-Oligo
gttttctcaacacactccaa

SEQ ID NO: 265 - DNA, 20 bp, Artificial Sequence
  HCV229E15  ID-Oligo
gtttagaaaaaatgaagcaa

SEQ ID NO: 266 - DNA, 19 bp, Artificial Sequence
  HCV229E16  ID-Oligo
ccaatagcctataagctta

SEQ ID NO: 267 - DNA, 21 bp, Artificial Sequence
  HCV229E17  ID-Oligo
gtaacttgggtgacaaatcca

SEQ ID NO: 268 - DNA, 17 bp, Artificial Sequence
  HCV229E18  ID-Oligo
gtacccgttttcgctga

SEQ ID NO: 269 - DNA, 20 bp, Artificial Sequence
  HCV229E19  ID-Oligo
accgtggcttttgcatttca

SEQ ID NO: 270 - DNA, 23 bp, Artificial Sequence
  SARS-C-U#1 Target Sequence
ttccaaaactgaggagaaatctg

SEQ ID NO: 271 - DNA, 21 bp, Artificial Sequence
  SARS-C-U#2 Target Sequence
tgtcactaagaaatctgctgc

SEQ ID NO: 272 - DNA, 20 bp, Artificial Sequence
  SARS-C-U#3 Target Sequence
tgatgaagctcagcctttgc

SEQ ID NO: 273 - DNA, 23 bp, Artificial Sequence
  SARS-C-U#1 Reverse Complement of Target Sequence
cagatttctcctcagttttggaa

SEQ ID NO: 274 - DNA, 21 bp, Artificial Sequence
  SARS-C-U#2 Reverse Complement of Target Sequence
gcagcagatttcttagtgaca

SEQ ID NO: 275 - DNA, 20 bp, Artificial Sequence
  SARS-C-U#3 Reverse Complement of Target Sequence
gcaaaggctgagcttcatca

SEQ ID NO: 276 - DNA, 59 bp, Artificial Sequence
  SARS-C-U#1 Synthetic ssDNA
aaacaagaggagccaccaaacacagaagattccaaaactgaggagaaatctgtcgtaca

SEQ ID NO: 277 - DNA, 55 bp, Artificial Sequence
  SARS-C-U#2 Synthetic ssDNA
ggtaaaggccaacaacaacaaggccaaactgtcactaagaaatctgctgctgagg

SEQ ID NO: 278 - DNA, 52 bp, Artificial Sequence
  SARS-C-U#3 Synthetic ssDNA
ctaaaaaggacaaaaagaaaaagactgatgaagctcagcctttgccgcagag

SEQ ID NO: 279 - DNA, 29882 bp, Artificial Sequence
  SARS-CoV2 WA-CDC-WA1/2020
attaaaggtttataccttcccaggtaacaaaccaaccaactttcgatctcttgtagatctgttctctaaacgaactttaaaatctgtgtggctgtcactcggctgcatgcttagtgcactcacgcagtataattaataactaattactgtcgttgacaggacacgagtaactcgtctatcttctgcaggctgcttacggtttcgtccgtgttgcagccgatcatcagcacatctaggtttcgtccgggtgtgaccgaaaggtaagatggagagccttgtccctggtttcaacgagaaaacacacgtccaactcagtttgcctgttttacaggttcgcgacgtgctcgtacgtggctttggagactccgtggaggaggtcttatcagaggcacgtcaacatcttaaagatggcacttgtggcttagtagaagttgaaaaaggcgttttgcctcaacttgaacagccctatgtgttcatcaaacgttcggatgctcgaactgcacctcatggtcatgttatggttgagctggtagcagaactcgaaggcattcagtacggtcgtagtggtgagacacttggtgtccttgtccctcatgtgggcgaaataccagtggcttaccgcaaggttcttcttcgtaagaacggtaataaaggagctggtggccatagttacggcgccgatctaaagtcatttgacttaggcgacgagcttggcactgatccttatgaagattttcaagaaaactggaacactaaacatagcagtggtgttacccgtgaactcatgcgtgagcttaacggaggggcatacactcgctatgtcgataacaacttctgtggccctgatggctaccctcttgagtgcattaaagaccttctagcacgtgctggtaaagcttcatgcactttgtccgaacaactggactttattgacactaagaggggtgtatactgctgccgtgaacatgagcatgaaattgcttggtacacggaacgttctgaaaagagctatgaattgcagacaccttttgaaattaaattggcaaagaaatttgacaccttcaatggggaatgtccaaattttgtatttcccttaaattccataatcaagactattcaaccaagggttgaaaagaaaaagcttgatggctttatgggtagaattcgatctgtctatccagttgcgtcaccaaatgaatgcaaccaaatgtgcctttcaactctcatgaagtgtgatcattgtggtgaaacttcatggcagacgggcgattttgttaaagccacttgcgaattttgtggcactgagaatttgactaaagaaggtgccactacttgtggttacttaccccaaaatgctgttgttaaaatttattgtccagcatgtcacaattcagaagtaggacctgagcatagtcttgccgaataccataatgaatctggcttgaaaaccattcttcgtaagggtggtcgcactattgcctttggaggctgtgtgttctcttatgttggttgccataacaagtgtgcctattgggttccacgtgctagcgctaacataggttgtaaccatacaggtgttgttggagaaggttccgaaggtcttaatgacaaccttcttgaaatactccaaaaagagaaagtcaacatcaatattgttggtgactttaaacttaatgaagagatcgccattattttggcatctttttctgcttccacaagtgcttttgtggaaactgtgaaaggtttggattataaagcattcaaacaaattgttgaatcctgtggtaattttaaagttacaaaaggaaaagctaaaaaaggtgcctggaatattggtgaacagaaatcaatactgagtcctctttatgcatttgcatcagaggctgctcgtgttgtacgatcaattttctcccgcactcttgaaactgctcaaaattctgtgcgtgttttacagaaggccgctataacaatactagatggaatttcacagtattcactgagactcattgatgctatgatgttcacatctgatttggctactaacaatctagttgtaatggcctacattacaggtggtgttgttcagttgacttcgcagtggctaactaacatctttggcactgtttatgaaaaactcaaacccgtccttgattggcttgaagagaagtttaaggaaggtgtagagtttcttagagacggttgggaaattgttaaatttatctcaacctgtgcttgtgaaattgtcggtggacaaattgtcacctgtgcaaaggaaattaaggagagtgttcagacattctttaagcttgtaaataaatttttggctttgtgtgctgactctatcattattggtggagctaaacttaaagccttgaatttaggtgaaacatttgtcacgcactcaaagggattgtacagaaagtgtgttaaatccagagaagaaactggcctactcatgcctctaaaagccccaaaagaaattatcttcttagagggagaaacacttcccacagaagtgttaacagaggaagttgtcttgaaaactggtgatttacaaccattagaacaacctactagtgaagctgttgaagctccattggttggtacaccagtttgtattaacgggcttatgttgctcgaaatcaaagacacagaaaagtactgtgcccttgcacctaatatgatggtaacaaacaataccttcacactcaaaggcggtgcaccaacaaaggttacttttggtgatgacactgtgatagaagtgcaaggttacaagagtgtgaatatcacttttgaacttgatgaaaggattgataaagtacttaatgagaagtgctctgcctatacagttgaactcggtacagaagtaaatgagttcgcctgtgttgtggcagatgctgtcataaaaactttgcaaccagtatctgaattacttacaccactgggcattgatttagatgagtggagtatggctacatactacttatttgatgagtctggtgagtttaaattggcttcacatatgtattgttctttctaccctccagatgaggatgaagaagaaggtgattgtgaagaagaagagtttgagccatcaactcaatatgagtatggtactgaagatgattaccaaggtaaacctttggaatttggtgccacttctgctgctcttcaacctgaagaagagcaagaagaagattggttagatgatgatagtcaacaaactgttggtcaacaagacggcagtgaggacaatcagacaactactattcaaacaattgttgaggttcaacctcaattagagatggaacttacaccagttgttcagactattgaagtgaatagttttagtggttatttaaaacttactgacaatgtatacattaaaaatgcagacattgtggaagaagctaaaaaggtaaaaccaacagtggttgttaatgcagccaatgtttaccttaaacatggaggaggtgttgcaggagccttaaataaggctactaacaatgccatgcaagttgaatctgatgattacatagctactaatggaccacttaaagtgggtggtagttgtgttttaagcggacacaatcttgctaaacactgtcttcatgttgtcggcccaaatgttaacaaaggtgaagacattcaacttcttaagagtgcttatgaaaattttaatcagcacgaagttctacttgcaccattattatcagctggtatttttggtgctgaccctatacattctttaagagtttgtgtagatactgttcgcacaaatgtctacttagctgtctttgataaaaatctctatgacaaacttgtttcaagctttttggaaatgaagagtgaaaagcaagttgaacaaaagatcgctgagattcctaaagaggaagttaagccatttataactgaaagtaaaccttcagttgaacagagaaaacaagatgataagaaaatcaaagcttgtgttgaagaagttacaacaactctggaagaaactaagttcctcacagaaaacttgttactttatattgacattaatggcaatcttcatccagattctgccactcttgttagtgacattgacatcactttcttaaagaaagatgctccatatatagtgggtgatgttgttcaagagggtgttttaactgctgtggttatacctactaaaaaggctggtggcactactgaaatgctagcgaaagctttgagaaaagtgccaacagacaattatataaccacttacccgggtcagggtttaaatggttacactgtagaggaggcaaagacagtgcttaaaaagtgtaaaagtgccttttacattctaccatctattatctctaatgagaagcaagaaattcttggaactgtttcttggaatttgcgagaaatgcttgcacatgcagaagaaacacgcaaattaatgcctgtctgtgtggaaactaaagccatagtttcaactatacagcgtaaatataagggtattaaaatacaagagggtgtggttgattatggtgctagattttacttttacaccagtaaaacaactgtagcgtcacttatcaacacacttaacgatctaaatgaaactcttgttacaatgccacttggctatgtaacacatggcttaaatttggaagaagctgctcggtatatgagatctctcaaagtgccagctacagtttctgtttcttcacctgatgctgttacagcgtataatggttatcttacttcttcttctaaaacacctgaagaacattttattgaaaccatctcacttgctggttcctataaagattggtcctattctggacaatctacacaactaggtatagaatttcttaagagaggtgataaaagtgtatattacactagtaatcctaccacattccacctagatggtgaagttatcacctttgacaatcttaagacacttctttctttgagagaagtgaggactattaaggtgtttacaacagtagacaacattaacctccacacgcaagttgtggacatgtcaatgacatatggacaacagtttggtccaacttatttggatggagctgatgttactaaaataaaacctcataattcacatgaaggtaaaacattttatgttttacctaatgatgacactctacgtgttgaggcttttgagtactaccacacaactgatcctagttttctgggtaggtacatgtcagcattaaatcacactaaaaagtggaaatacccacaagttaatggtttaacttctattaaatgggcagataacaactgttatcttgccactgcattgttaacactccaacaaatagagttgaagtttaatccacctgctctacaagatgcttattacagagcaagggctggtgaagctgctaacttttgtgcacttatcttagcctactgtaataagacagtaggtgagttaggtgatgttagagaaacaatgagttacttgtttcaacatgccaatttagattcttgcaaaagagtcttgaacgtggtgtgtaaaacttgtggacaacagcagacaacccttaagggtgtagaagctgttatgtacatgggcacactttcttatgaacaatttaagaaaggtgttcagataccttgtacgtgtggtaaacaagctacaaaatatctagtacaacaggagtcaccttttgttatgatgtcagcaccacctgctcagtatgaacttaagcatggtacatttacttgtgctagtgagtacactggtaattaccagtgtggtcactataaacatataacttctaaagaaactttgtattgcatagacggtgctttacttacaaagtcctcagaatacaaaggtcctattacggatgttttctacaaagaaaacagttacacaacaaccataaaaccagttacttataaattggatggtgttgtttgtacagaaattgaccctaagttggacaattattataagaaagacaattcttatttcacagagcaaccaattgatcttgtaccaaaccaaccatatccaaacgcaagcttcgataattttaagtttgtatgtgataatatcaaatttgctgatgatttaaaccagttaactggttataagaaacctgcttcaagagagcttaaagttacatttttccctgacttaaatggtgatgtggtggctattgattataaacactacacaccctcttttaagaaaggagctaaattgttacataaacctattgtttggcatgttaacaatgcaactaataaagccacgtataaaccaaatacctggtgtatacgttgtctttggagcacaaaaccagttgaaacatcaaattcgtttgatgtactgaagtcagaggacgcgcagggaatggataatcttgcctgcgaagatctaaaaccagtctctgaagaagtagtggaaaatcctaccatacagaaagacgttcttgagtgtaatgtgaaaactaccgaagttgtaggagacattatacttaaaccagcaaataatagtttaaaaattacagaagaggttggccacacagatctaatggctgcttatgtagacaattctagtcttactattaagaaacctaatgaattatctagagtattaggtttgaaaacccttgctactcatggtttagctgctgttaatagtgtcccttgggatactatagctaattatgctaagccttttcttaacaaagttgttagtacaactactaacatagttacacggtgtttaaaccgtgtttgtactaattatatgccttatttctttactttattgctacaattgtgtacttttactagaagtacaaattctagaattaaagcatctatgccgactactatagcaaagaatactgttaagagtgtcggtaaattttgtctagaggcttcatttaattatttgaagtcacctaatttttctaaactgataaatattataatttggtttttactattaagtgtttgcctaggttctttaatctactcaaccgctgctttaggtgttttaatgtctaatttaggcatgccttcttactgtactggttacagagaaggctatttgaactctactaatgtcactattgcaacctactgtactggttctataccttgtagtgtttgtcttagtggtttagattctttagacacctatccttctttagaaactatacaaattaccatttcatcttttaaatgggatttaactgcttttggcttagttgcagagtggtttttggcatatattcttttcactaggtttttctatgtacttggattggctgcaatcatgcaattgtttttcagctattttgcagtacattttattagtaattcttggcttatgtggttaataattaatcttgtacaaatggccccgatttcagctatggttagaatgtacatcttctttgcatcattttattatgtatggaaaagttatgtgcatgttgtagacggttgtaattcatcaacttgtatgatgtgttacaaacgtaatagagcaacaagagtcgaatgtacaactattgttaatggtgttagaaggtccttttatgtctatgctaatggaggtaaaggcttttgcaaactacacaattggaattgtgttaattgtgatacattctgtgctggtagtacatttattagtgatgaagttgcgagagacttgtcactacagtttaaaagaccaataaatcctactgaccagtcttcttacatcgttgatagtgttacagtgaagaatggttccatccatctttactttgataaagctggtcaaaagacttatgaaagacattctctctctcattttgttaacttagacaacctgagagctaataacactaaaggttcattgcctattaatgttatagtttttgatggtaaatcaaaatgtgaagaatcatctgcaaaatcagcgtctgtttactacagtcagcttatgtgtcaacctatactgttactagatcaggcattagtgtctgatgttggtgatagtgcggaagttgcagttaaaatgtttgatgcttacgttaatacgttttcatcaacttttaacgtaccaatggaaaaactcaaaacactagttgcaactgcagaagctgaacttgcaaagaatgtgtccttagacaatgtcttatctacttttatttcagcagctcggcaagggtttgttgattcagatgtagaaactaaagatgttgttgaatgtcttaaattgtcacatcaatctgacatagaagttactggcgatagttgtaataactatatgctcacctataacaaagttgaaaacatgacaccccgtgaccttggtgcttgtattgactgtagtgcgcgtcatattaatgcgcaggtagcaaaaagtcacaacattgctttgatatggaacgttaaagatttcatgtcattgtctgaacaactacgaaaacaaatacgtagtgctgctaaaaagaataacttaccttttaagttgacatgtgcaactactagacaagttgttaatgttgtaacaacaaagatagcacttaagggtggtaaaattgttaataattggttgaagcagttaattaaagttacacttgtgttcctttttgttgctgctattttctatttaataacacctgttcatgtcatgtctaaacatactgacttttcaagtgaaatcataggatacaaggctattgatggtggtgtcactcgtgacatagcatctacagatacttgttttgctaacaaacatgctgattttgacacatggtttagtcagcgtggtggtagttatactaatgacaaagcttgcccattgattgctgcagtcataacaagagaagtgggttttgtcgtgcctggtttgcctggcacgatattacgcacaactaatggtgactttttgcatttcttacctagagtttttagtgcagttggtaacatctgttacacaccatcaaaacttatagagtacactgactttgcaacatcagcttgtgttttggctgctgaatgtacaatttttaaagatgcttctggtaagccagtaccatattgttatgataccaatgtactagaaggttctgttgcttatgaaagtttacgccctgacacacgttatgtgctcatggatggctctattattcaatttcctaacacctaccttgaaggttctgttagagtggtaacaacttttgattctgagtactgtaggcacggcacttgtgaaagatcagaagctggtgtttgtgtatctactagtggtagatgggtacttaacaatgattattacagatctttaccaggagttttctgtggtgtagatgctgtaaatttacttactaatatgtttacaccactaattcaacctattggtgctttggacatatcagcatctatagtagctggtggtattgtagctatcgtagtaacatgccttgcctactattttatgaggtttagaagagcttttggtgaatacagtcatgtagttgcctttaatactttactattccttatgtcattcactgtactctgtttaacaccagtttactcattcttacctggtgtttattctgttatttacttgtacttgacattttatcttactaatgatgtttcttttttagcacatattcagtggatggttatgttcacacctttagtacctttctggataacaattgcttatatcatttgtatttccacaaagcatttctattggttctttagtaattacctaaagagacgtgtagtctttaatggtgtttcctttagtacttttgaagaagctgcgctgtgcacctttttgttaaataaagaaatgtatctaaagttgcgtagtgatgtgctattacctcttacgcaatataatagatacttagctctttataataagtacaagtattttagtggagcaatggatacaactagctacagagaagctgcttgttgtcatctcgcaaaggctctcaatgacttcagtaactcaggttctgatgttctttaccaaccaccacaaacctctatcacctcagctgttttgcagagtggttttagaaaaatggcattcccatctggtaaagttgagggttgtatggtacaagtaacttgtggtacaactacacttaacggtctttggcttgatgacgtagtttactgtccaagacatgtgatctgcacctctgaagacatgcttaaccctaattatgaagatttactcattcgtaagtctaatcataatttcttggtacaggctggtaatgttcaactcagggttattggacattctatgcaaaattgtgtacttaagcttaaggttgatacagccaatcctaagacacctaagtataagtttgttcgcattcaaccaggacagactttttcagtgttagcttgttacaatggttcaccatctggtgtttaccaatgtgctatgaggcccaatttcactattaagggttcattccttaatggttcatgtggtagtgttggttttaacatagattatgactgtgtctctttttgttacatgcaccatatggaattaccaactggagttcatgctggcacagacttagaaggtaacttttatggaccttttgttgacaggcaaacagcacaagcagctggtacggacacaactattacagttaatgttttagcttggttgtacgctgctgttataaatggagacaggtggtttctcaatcgatttaccacaactcttaatgactttaaccttgtggctatgaagtacaattatgaacctctaacacaagaccatgttgacatactaggacctctttctgctcaaactggaattgccgttttagatatgtgtgcttcattaaaagaattactgcaaaatggtatgaatggacgtaccatattgggtagtgctttattagaagatgaatttacaccttttgatgttgttagacaatgctcaggtgttactttccaaagtgcagtgaaaagaacaatcaagggtacacaccactggttgttactcacaattttgacttcacttttagttttagtccagagtactcaatggtctttgttcttttttttgtatgaaaatgcctttttaccttttgctatgggtattattgctatgtctgcttttgcaatgatgtttgtcaaacataagcatgcatttctctgtttgtttttgttaccttctcttgccactgtagcttattttaatatggtctatatgcctgctagttgggtgatgcgtattatgacatggttggatatggttgatactagtttgtctggttttaagctaaaagactgtgttatgtatgcatcagctgtagtgttactaatccttatgacagcaagaactgtgtatgatgatggtgctaggagagtgtggacacttatgaatgtcttgacactcgtttataaagtttattatggtaatgctttagatcaagccatttccatgtgggctcttataatctctgttacttctaactactcaggtgtagttacaactgtcatgtttttggccagaggtattgtttttatgtgtgttgagtattgccctattttcttcataactggtaatacacttcagtgtataatgctagtttattgtttcttaggctatttttgtacttgttactttggcctcttttgtttactcaaccgctactttagactgactcttggtgtttatgattacttagtttctacacaggagtttagatatatgaattcacagggactactcccacccaagaatagcatagatgccttcaaactcaacattaaattgttgggtgttggtggcaaaccttgtatcaaagtagccactgtacagtctaaaatgtcagatgtaaagtgcacatcagtagtcttactctcagttttgcaacaactcagagtagaatcatcatctaaattgtgggctcaatgtgtccagttacacaatgacattctcttagctaaagatactactgaagcctttgaaaaaatggtttcactactttctgttttgctttccatgcagggtgctgtagacataaacaagctttgtgaagaaatgctggacaacagggcaaccttacaagctatagcctcagagtttagttcccttccatcatatgcagcttttgctactgctcaagaagcttatgagcaggctgttgctaatggtgattctgaagttgttcttaaaaagttgaagaagtctttgaatgtggctaaatctgaatttgaccgtgatgcagccatgcaacgtaagttggaaaagatggctgatcaagctatgacccaaatgtataaacaggctagatctgaggacaagagggcaaaagttactagtgctatgcagacaatgcttttcactatgcttagaaagttggataatgatgcactcaacaacattatcaacaatgcaagagatggttgtgttcccttgaacataatacctcttacaacagcagccaaactaatggttgtcataccagactataacacatataaaaatacgtgtgatggtacaacatttacttatgcatcagcattgtgggaaatccaacaggttgtagatgcagatagtaaaattgttcaacttagtgaaattagtatggacaattcacctaatttagcatggcctcttattgtaacagctttaagggccaattctgctgtcaaattacagaataatgagcttagtcctgttgcactacgacagatgtcttgtgctgccggtactacacaaactgcttgcactgatgacaatgcgttagcttactacaacacaacaaagggaggtaggtttgtacttgcactgttatccgatttacaggatttgaaatgggctagattccctaagagtgatggaactggtactatctatacagaactggaaccaccttgtaggtttgttacagacacacctaaaggtcctaaagtgaagtatttatactttattaaaggattaaacaacctaaatagaggtatggtacttggtagtttagctgccacagtacgtctacaagctggtaatgcaacagaagtgcctgccaattcaactgtattatctttctgtgcttttgctgtagatgctgctaaagcttacaaagattatctagctagtgggggacaaccaatcactaattgtgttaagatgttgtgtacacacactggtactggtcaggcaataacagttacaccggaagccaatatggatcaagaatcctttggtggtgcatcgtgttgtctgtactgccgttgccacatagatcatccaaatcctaaaggattttgtgacttaaaaggtaagtatgtacaaatacctacaacttgtgctaatgaccctgtgggttttacacttaaaaacacagtctgtaccgtctgcggtatgtggaaaggttatggctgtagttgtgatcaactccgcgaacccatgcttcagtcagctgatgcacaatcgtttttaaacgggtttgcggtgtaagtgcagcccgtcttacaccgtgcggcacaggcactagtactgatgtcgtatacagggcttttgacatctacaatgataaagtagctggttttgctaaattcctaaaaactaattgttgtcgcttccaagaaaaggacgaagatgacaatttaattgattcttactttgtagttaagagacacactttctctaactaccaacatgaagaaacaatttataatttacttaaggattgtccagctgttgctaaacatgacttctttaagtttagaatagacggtgacatggtaccacatatatcacgtcaacgtcttactaaatacacaatggcagacctcgtctatgctttaaggcattttgatgaaggtaattgtgacacattaaaagaaatacttgtcacatacaattgttgtgatgatgattatttcaataaaaaggactggtatgattttgtagaaaacccagatatattacgcgtatacgccaacttaggtgaacgtgtacgccaagctttgttaaaaacagtacaattctgtgatgccatgcgaaatgctggtattgttggtgtactgacattagataatcaagatctcaatggtaactggtatgatttcggtgatttcatacaaaccacgccaggtagtggagttcctgttgtagattcttattattcattgttaatgcctatattaaccttgaccagggctttaactgcagagtcacatgttgacactgacttaacaaagccttacattaagtgggatttgttaaaatatgacttcacggaagagaggttaaaactctttgaccgttattttaaatattgggatcagacataccacccaaattgtgttaactgtttggatgacagatgcattctgcattgtgcaaactttaatgttttattctctacagtgttcccacctacaagttttggaccactagtgagaaaaatatttgttgatggtgttccatttgtagtttcaactggataccacttcagagagctaggtgttgtacataatcaggatgtaaacttacatagctctagacttagttttaaggaattacttgtgtatgctgctgaccctgctatgcacgctgcttctggtaatctattactagataaacgcactacgtgcttttcagtagctgcacttactaacaatgttgcttttcaaactgtcaaacccggtaattttaacaaagacttctatgactttgctgtgtctaagggtttctttaaggaaggaagttctgttgaattaaaacacttcttctttgctcaggatggtaatgctgctatcagcgattatgactactatcgttataatctaccaacaatgtgtgatatcagacaactactatttgtagttgaagttgttgataagtactttgattgttacgatggtggctgtattaatgctaaccaagtcatcgtcaacaacctagacaaatcagctggttttccatttaataaatggggtaaggctagactttattatgattcaatgagttatgaggatcaagatgcacttttcgcatatacaaaacgtaatgtcatccctactataactcaaatgaatcttaagtatgccattagtgcaaagaatagagctcgcaccgtagctggtgtctctatctgtagtactatgaccaatagacagtttcatcaaaaattattgaaatcaatagccgccactagaggagctactgtagtaattggaacaagcaaattctatggtggttggcacaacatgttaaaaactgtttatagtgatgtagaaaaccctcaccttatgggttgggattatcctaaatgtgatagagccatgcctaacatgcttagaattatggcctcacttgttcttgctcgcaaacatacaacgtgttgtagcttgtcacaccgtttctatagattagctaatgagtgtgctcaagtattgagtgaaatggtcatgtgtggcggttcactatatgttaaaccaggtggaacctcatcaggagatgccacaactgcttatgctaatagtgtttttaacatttgtcaagctgtcacggccaatgttaatgcacttttatctactgatggtaacaaaattgccgataagtatgtccgcaatttacaacacagactttatgagtgtctctatagaaatagagatgttgacacagactttgtgaatgagttttacgcatatttgcgtaaacatttctcaatgatgatactctctgacgatgctgttgtgtgtttcaatagcacttatgcatctcaaggtctagtggctagcataaagaactttaagtcagttctttattatcaaaacaatgtttttatgtctgaagcaaaatgttggactgagactgaccttactaaaggacctcatgaattttgctctcaacatacaatgctagttaaacagggtgatgattatgtgtaccttccttacccagatccatcaagaatcctaggggccggctgttttgtagatgatatcgtaaaaacagatggtacacttatgattgaacggttcgtgtctttagctatagatgcttacccacttactaaacatcctaatcaggagtatgctgatgtctttcatttgtacttacaatacataagaaagctacatgatgagttaacaggacacatgttagacatgtattctgttatgcttactaatgataacacttcaaggtattgggaacctgagttttatgaggctatgtacacaccgcatacagtcttacaggctgttggggcttgtgttctttgcaattcacagacttcattaagatgtggtgcttgcatacgtagaccattcttatgttgtaaatgctgttacgaccatgtcatatcaacatcacataaattagtcttgtctgttaatccgtatgtttgcaatgctccaggttgtgatgtcacagatgtgactcaactttacttaggaggtatgagctattattgtaaatcacataaaccacccattagttttccattgtgtgctaatggacaagtttttggtttatataaaaatacatgtgttggtagcgataatgttactgactttaatgcaattgcaacatgtgactggacaaatgctggtgattacattttagctaacacctgtactgaaagactcaagctttttgcagcagaaacgctcaaagctactgaggagacatttaaactgtcttatggtattgctactgtacgtgaagtgctgtctgacagagaattacatctttcatgggaagttggtaaacctagaccaccacttaaccgaaattatgtctttactggttatcgtgtaactaaaaacagtaaagtacaaataggagagtacacctttgaaaaaggtgactatggtgatgctgttgtttaccgaggtacaacaacttacaaattaaatgttggtgattattttgtgctgacatcacatacagtaatgccattaagtgcacctacactagtgccacaagagcactatgttagaattactggcttatacccaacactcaatatctcagatgagttttctagcaatgttgcaaattatcaaaaggttggtatgcaaaagtattctacactccagggaccacctggtactggtaagagtcattttgctattggcctagctctctactacccttctgctcgcatagtgtatacagcttgctctcatgccgctgttgatgcactatgtgagaaggcattaaaatatttgcctatagataaatgtagtagaattatacctgcacgtgctcgtgtagagtgttttgataaattcaaagtgaattcaacattagaacagtatgtcttttgtactgtaaatgcattgcctgagacgacagcagatatagttgtctttgatgaaatttcaatggccacaaattatgatttgagtgttgtcaatgccagattacgtgctaagcactatgtgtacattggcgaccctgctcaattacctgcaccacgcacattgctaactaagggcacactagaaccagaatatttcaattcagtgtgtagacttatgaaaactataggtccagacatgttcctcggaacttgtcggcgttgtcctgctgaaattgttgacactgtgagtgctttggtttatgataataagcttaaagcacataaagacaaatcagctcaatgctttaaaatgttttataagggtgttatcacgcatgatgtttcatctgcaattaacaggccacaaataggcgtggtaagagaattccttacacgtaaccctgcttggagaaaagctgtctttatttcaccttataattcacagaatgctgtagcctcaaagattttgggactaccaactcaaactgttgattcatcacagggctcagaatatgactatgtcatattcactcaaaccactgaaacagctcactcttgtaatgtaaacagatttaatgttgctattaccagagcaaaagtaggcatactttgcataatgtctgatagagacctttatgacaagttgcaatttacaagtcttgaaattccacgtaggaatgtggcaactttacaagctgaaaatgtaacaggactttttaaagattgtagtaaggtaatcactgggttacatcctacacaggcacctacacacctcagtgttgacactaaattcaaaactgaaggtttatgtgttgacatacctggcatacctaaggacatgacctatagaagactcatctctatgatgggttttaaaatgaattatcaagttaatggttaccctaacatgtttatcacccgcgaagaagctataagacatgtacgtgcatggattggcttcgatgtcgaggggtgtcatgctactagagaagctgttggtaccaatttacctttacagctaggtttttctacaggtgttaacctagttgctgtacctacaggttatgttgatacacctaataatacagatttttccagagttagtgctaaaccaccgcctggagatcaatttaaacacctcataccacttatgtacaaaggacttccttggaatgtagtgcgtataaagattgtacaaatgttaagtgacacacttaaaaatctctctgacagagtcgtatttgtcttatgggcacatggctttgagttgacatctatgaagtattttgtgaaaataggacctgagcgcacctgttgtctatgtgatagacgtgccacatgcttttccactgcttcagacacttatgcctgttggcatcattctattggatttgattacgtctataatccgtttatgattgatgttcaacaatggggttttacaggtaacctacaaagcaaccatgatctgtattgtcaagtccatggtaatgcacatgtagctagttgtgatgcaatcatgactaggtgtctagctgtccacgagtgctttgttaagcgtgttgactggactattgaatatcctataattggtgatgaactgaagattaatgcggcttgtagaaaggttcaacacatggttgttaaagctgcattattagcagacaaattcccagttcttcacgacattggtaaccctaaagctattaagtgtgtacctcaagctgatgtagaatggaagttctatgatgcacagccttgtagtgacaaagcttataaaatagaagaattattctattcttatgccacacattctgacaaattcacagatggtgtatgcctattttggaattgcaatgtcgatagatatcctgctaattccattgtttgtagatttgacactagagtgctatctaaccttaacttgcctggttgtgatggtggcagtttgtatgtaaataaacatgcattccacacaccagcttttgataaaagtgcttttgttaatttaaaacaattaccatttttctattactctgacagtccatgtgagtctcatggaaaacaagtagtgtcagatatagattatgtaccactaaagtctgctacgtgtataacacgttgcaatttaggtggtgctgtctgtagacatcatgctaatgagtacagattgtatctcgatgcttataacatgatgatctcagctggctttagcttgtgggtttacaaacaatttgatacttataacctctggaacacttttacaagacttcagagtttagaaaatgtggcttttaatgttgtaaataagggacactttgatggacaacagggtgaagtaccagtttctatcattaataacactgtttacacaaaagttgatggtgttgatgtagaattgtttgaaaataaaacaacattacctgttaatgtagcatttgagctttgggctaagcgcaacattaaaccagtaccagaggtgaaaatactcaataatttgggtgtggacattgctgctaatactgtgatctgggactacaaaagagatgctccagcacatatatctactattggtgtttgttctatgactgacatagccaagaaaccaactgaaacgatttgtgcaccactcactgtcttttttgatggtagagttgatggtcaagtagacttatttagaaatgcccgtaatggtgttcttattacagaaggtagtgttaaaggtttacaaccatctgtaggtcccaaacaagctagtcttaatggagtcacattaattggagaagccgtaaaaacacagttcaattattataagaaagttgatggtgttgtccaacaattacctgaaacttactttactcagagtagaaatttacaagaatttaaacccaggagtcaaatggaaattgatttcttagaattagctatggatgaattcattgaacggtataaattagaaggctatgccttcgaacatatcgtttatggagattttagtcatagtcagttaggtggtttacatctactgattggactagctaaacgttttaaggaatcaccttttgaattagaagattttattcctatggacagtacagttaaaaactatttcataacagatgcgcaaacaggttcatctaagtgtgtgtgttctgttattgatttattacttgatgattttgttgaaataataaaatcccaagatttatctgtagtttctaaggttgtcaaagtgactattgactatacagaaatttcatttatgctttggtgtaaagatggccatgtagaaacattttacccaaaattacaatctagtcaagcgtggcaaccgggtgttgctatgcctaatctttacaaaatgcaaagaatgctattagaaaagtgtgaccttcaaaattatggtgatagtgcaacattacctaaaggcataatgatgaatgtcgcaaaatatactcaactgtgtcaatatttaaacacattaacattagctgtaccctataatatgagagttatacattttggtgctggttctgataaaggagttgcaccaggtacagctgttttaagacagtggttgcctacgggtacgctgcttgtcgattcagatcttaatgactttgtctctgatgcagattcaactttgattggtgattgtgcaactgtacatacagctaataaatgggatctcattattagtgatatgtacgaccctaagactaaaaatgttacaaaagaaaatgactctaaagagggttttttcacttacatttgtgggtttatacaacaaaagctagctcttggaggttccgtggctataaagataacagaacattcttggaatgctgatctttataagctcatgggacacttcgcatggtggacagcctttgttactaatgtgaatgcgtcatcatctgaagcatttttaattggatgtaattatcttggcaaaccacgcgaacaaatagatggttatgtcatgcatgcaaattacatattttggaggaatacaaatccaattcagttgtcttcctattctttatttgacatgagtaaatttccccttaaattaaggggtactgctgttatgtctttaaaagaaggtcaaatcaatgatatgattttatctcttcttagtaaaggtagacttataattagagaaaacaacagagttgttatttctagtgatgttcttgttaacaactaaacgaacaatgtttgtttttcttgttttattgccactagtctctagtcagtgtgttaatcttacaaccagaactcaattaccccctgcatacactaattctttcacacgtggtgtttattaccctgacaaagttttcagatcctcagttttacattcaactcaggacttgttcttacctttcttttccaatgttacttggttccatgctatacatgtctctgggaccaatggtactaagaggtttgataaccctgtcctaccatttaatgatggtgtttattttgcttccactgagaagtctaacataataagaggctggatttttggtactactttagattcgaagacccagtccctacttattgttaataacgctactaatgttgttattaaagtctgtgaatttcaattttgtaatgatccatttttgggtgtttattaccacaaaaacaacaaaagttggatggaaagtgagttcagagtttattctagtgcgaataattgcacttttgaatatgtctctcagccttttcttatggaccttgaaggaaaacagggtaatttcaaaaatcttagggaatttgtgtttaagaatattgatggttattttaaaatatattctaagcacacgcctattaatttagtgcgtgatctccctcagggtttttcggctttagaaccattggtagatttgccaataggtattaacatcactaggtttcaaactttacttgctttacatagaagttatttgactcctggtgattcttcttcaggttggacagctggtgctgcagcttattatgtgggttatcttcaacctaggacttttctattaaaatataatgaaaatggaaccattacagatgctgtagactgtgcacttgaccctctctcagaaacaaagtgtacgttgaaatccttcactgtagaaaaaggaatctatcaaacttctaactttagagtccaaccaacagaatctattgttagatttcctaatattacaaacttgtgcccttttggtgaagtttttaacgccaccagatttgcatctgtttatgcttggaacaggaagagaatcagcaactgtgttgctgattattctgtcctatataattccgcatcattttccacttttaagtgttatggagtgtctcctactaaattaaatgatctctgctttactaatgtctatgcagattcatttgtaattagaggtgatgaagtcagacaaatcgctccagggcaaactggaaagattgctgattataattataaattaccagatgattttacaggctgcgttatagcttggaattctaacaatcttgattctaaggttggtggtaattataattacctgtatagattgtttaggaagtctaatctcaaaccttttgagagagatatttcaactgaaatctatcaggccggtagcacaccttgtaatggtgttgaaggttttaattgttactttcctttacaatcatatggtttccaacccactaatggtgttggttaccaaccatacagagtagtagtactttcttttgaacttctacatgcaccagcaactgtttgtggacctaaaaagtctactaatttggttaaaaacaaatgtgtcaatttcaacttcaatggtttaacaggcacaggtgttcttactgagtctaacaaaaagtttctgcctttccaacaatttggcagagacattgctgacactactgatgctgtccgtgatccacagacacttgagattcttgacattacaccatgttcttttggtggtgtcagtgttataacaccaggaacaaatacttctaaccaggttgctgttctttatcaggatgttaactgcacagaagtccctgttgctattcatgcagatcaacttactcctacttggcgtgtttattctacaggttctaatgtttttcaaacacgtgcaggctgtttaataggggctgaacatgtcaacaactcatatgagtgtgacatacccattggtgcaggtatatgcgctagttatcagactcagactaattctcctcggcgggcacgtagtgtagctagtcaatccatcattgcctacactatgtcacttggtgcagaaaattcagttgcttactctaataactctattgccatacccacaaattttactattagtgttaccacagaaattctaccagtgtctatgaccaagacatcagtagattgtacaatgtacatttgtggtgattcaactgaatgcagcaatcttttgttgcaatatggcagtttttgtacacaattaaaccgtgctttaactggaatagctgttgaacaagacaaaaacacccaagaagtttttgcacaagtcaaacaaatttacaaaacaccaccaattaaagattttggtggttttaatttttcacaaatattaccagatccatcaaaaccaagcaagaggtcatttattgaagatctacttttcaacaaagtgacacttgcagatgctggcttcatcaaacaatatggtgattgccttggtgatattgctgctagagacctcatttgtgcacaaaagtttaacggccttactgttttgccacctttgctcacagatgaaatgattgctcaatacacttctgcactgttagcgggtacaatcacttctggttggacctttggtgcaggtgctgcattacaaataccatttgctatgcaaatggcttataggtttaatggtattggagttacacagaatgttctctatgagaaccaaaaattgattgccaaccaatttaatagtgctattggcaaaattcaagactcactttcttccacagcaagtgcacttggaaaacttcaagatgtggtcaaccaaaatgcacaagctttaaacacgcttgttaaacaacttagctccaattttggtgcaatttcaagtgttttaaatgatatcctttcacgtcttgacaaagttgaggctgaagtgcaaattgataggttgatcacaggcagacttcaaagtttgcagacatatgtgactcaacaattaattagagctgcagaaatcagagcttctgctaatcttgctgctactaaaatgtcagagtgtgtacttggacaatcaaaaagagttgatttttgtggaaagggctatcatcttatgtccttccctcagtcagcacctcatggtgtagtcttcttgcatgtgacttatgtccctgcacaagaaaagaacttcacaactgctcctgccatttgtcatgatggaaaagcacactttcctcgtgaaggtgtctttgtttcaaatggcacacactggtttgtaacacaaaggaatttttatgaaccacaaatcattactacagacaacacatttgtgtctggtaactgtgatgttgtaataggaattgtcaacaacacagtttatgatcctttgcaacctgaattagactcattcaaggaggagttagataaatattttaagaatcatacatcaccagatgttgatttaggtgacatctctggcattaatgcttcagttgtaaacattcaaaaagaaattgaccgcctcaatgaggttgccaagaatttaaatgaatctctcatcgatctccaagaacttggaaagtatgagcagtatataaaatggccatggtacatttggctaggttttatagctggcttgattgccatagtaatggtgacaattatgctttgctgtatgaccagttgctgtagttgtctcaagggctgttgttcttgtggatcctgctgcaaatttgatgaagacgactctgagccagtgctcaaaggagtcaaattacattacacataaacgaacttatggatttgtttatgagaatcttcacaattggaactgtaactttgaagcaaggtgaaatcaaggatgctactccttcagattttgttcgcgctactgcaacgataccgatacaagcctcactccctttcggatggcttattgttggcgttgcacttcttgctgtttttcagagcgcttccaaaatcataaccctcaaaaagagatggcaactagcactctccaagggtgttcactttgtttgcaacttgctgttgttgtttgtaacagtttactcacaccttttgctcgttgctgctggccttgaagccccttttctctatctttatgctttagtctacttcttgcagagtataaactttgtaagaataataatgaggctttggctttgctggaaatgccgttccaaaaacccattactttatgatgccaactattttctttgctggcatactaattgttacgactattgtataccttacaatagtgtaacttcttcaattgtcattacttcaggtgatggcacaacaagtcctatttctgaacatgactaccagattggtggttatactgaaaaatgggaatctggagtaaaagactgtgttgtattacacagttacttcacttcagactattaccagctgtactcaactcaattgagtacagacactggtgttgaacatgttaccttcttcatctacaataaaattgttgatgagcctgaagaacatgtccaaattcacacaatcgacggttcatccggagttgttaatccagtaatggaaccaatttatgatgaaccgacgacgactactagcgtgcctttgtaagcacaagctgatgagtacgaacttatgtactcattcgtttcggaagagacaggtacgttaatagttaatagcgtacttctttttcttgctttcgtggtattcttgctagttacactagccatccttactgcgcttcgattgtgtgcgtactgctgcaatattgttaacgtgagtcttgtaaaaccttctttttacgtttactctcgtgttaaaaatctgaattcttctagagttcctgatcttctggtctaaacgaactaaatattatattagtttttctgtttggaactttaattttagccatggcagattccaacggtactattaccgttgaagagcttaaaaagctccttgaacaatggaacctagtaataggtttcctattccttacatggatttgtcttctacaatttgcctatgccaacaggaataggtttttgtatataattaagttaattttcctctggctgttatggccagtaactttagcttgttttgtgcttgctgctgtttacagaataaattggatcaccggtggaattgctatcgcaatggcttgtcttgtaggcttgatgtggctcagctacttcattgcttctttcagactgtttgcgcgtacgcgttccatgtggtcattcaatccagaaactaacattcttctcaacgtgccactccatggcactattctgaccagaccgcttctagaaagtgaactcgtaatcggagctgtgatccttcgtggacatcttcgtattgctggacaccatctaggacgctgtgacatcaaggacctgcctaaagaaatcactgttgctacatcacgaacgctttcttattacaaattgggagcttcgcagcgtgtagcaggtgactcaggttttgctgcatacagtcgctacaggattggcaactataaattaaacacagaccattccagtagcagtgacaatattgctttgcttgtacagtaagtgacaacagatgtttcatctcgttgactttcaggttactatagcagagatattactaattattatgaggacttttaaagtttccatttggaatcttgattacatcataaacctcataattaaaaatttatctaagtcactaactgagaataaatattctcaattagatgaagagcaaccaatggagattgattaaacgaacatgaaaattattcttttcttggcactgataacactcgctacttgtgagctttatcactaccaagagtgtgttagaggtacaacagtacttttaaaagaaccttgctcttctggaacatacgagggcaattcaccatttcatcctctagctgataacaaatttgcactgacttgctttagcactcaatttgcttttgcttgtcctgacggcgtaaaacacgtctatcagttacgtgccagatcagtttcacctaaactgttcatcagacaagaggaagttcaagaactttactctccaatttttcttattgttgcggcaatagtgtttataacactttgcttcacactcaaaagaaagacagaatgattgaactttcattaattgacttctatttgtgctttttagcctttctgctattccttgttttaattatgcttattatcttttggttctcacttgaactgcaagatcataatgaaacttgtcacgcctaaacgaacatgaaatttcttgttttcttaggaatcatcacaactgtagctgcatttcaccaagaatgtagtttacagtcatgtactcaacatcaaccatatgtagttgatgacccgtgtcctattcacttctattctaaatggtatattagagtaggagctagaaaatcagcacctttaattgaattgtgcgtggatgaggctggttctaaatcacccattcagtacatcgatatcggtaattatacagtttcctgttcaccttttacaattaattgccaggaacctaaattgggtagtcttgtagtgcgttgttcgttctatgaagactttttagagtatcatgacgttcgtgttgttttagatttcatctaaacgaacaaactaaaatgtctgataatggaccccaaaatcagcgaaatgcaccccgcattacgtttggtggaccctcagattcaactggcagtaaccagaatggagaacgcagtggggcgcgatcaaaacaacgtcggccccaaggtttacccaataatactgcgtcttggttcaccgctctcactcaacatggcaaggaagaccttaaattccctcgaggacaaggcgttccaattaacaccaatagcagtccagatgaccaaattggctactaccgaagagctaccagacgaattcgtggtggtgacggtaaaatgaaagatctcagtccaagatggtatttctactacctaggaactgggccagaagctggacttccctatggtgctaacaaagacggcatcatatgggttgcaactgagggagccttgaatacaccaaaagatcacattggcacccgcaatcctgctaacaatgctgcaatcgtgctacaacttcctcaaggaacaacattgccaaaaggcttctacgcagaagggagcagaggcggcagtcaagcctcttctcgttcctcatcacgtagtcgcaacagttcaagaaattcaactccaggcagcagtaggggaacttctcctgctagaatggctggcaatggcggtgatgctgctcttgctttgctgctgcttgacagattgaaccagcttgagagcaaaatgtctggtaaaggccaacaacaacaaggccaaactgtcactaagaaatctgctgctgaggcttctaagaagcctcggcaaaaacgtactgccactaaagcatacaatgtaacacaagctttcggcagacgtggtccagaacaaacccaaggaaattttggggaccaggaactaatcagacaaggaactgattacaaacattggccgcaaattgcacaatttgcccccagcgcttcagcgttcttcggaatgtcgcgcattggcatggaagtcacaccttcgggaacgtggttgacctacacaggtgccatcaaattggatgacaaagatccaaatttcaaagatcaagtcattttgctgaataagcatattgacgcatacaaaacattcccaccaacagagcctaaaaaggacaaaaagaagaaggctgatgaaactcaagccttaccgcagagacagaagaaacagcaaactgtgactcttcttcctgctgcagatttggatgatttctccaaacaattgcaacaatccatgagcagtgctgactcaactcaggcctaaactcatgcagaccacacaaggcagatgggctatataaacgttttcgcttttccgtttacgatatatagtctactcttgtgcagaatgaattctcgtaactacatagcacaagtagatgtagttaactttaatctcacatagcaatctttaatcagtgtgtaacattagggaggacttgaaagagccaccacattttcaccgaggccacgcggagtacgatcgagtgtacagtgaacaatgctagggagagctgcctatatggaagagccctaatgtgtaaaattaattttagtagtgctatccccatgtgattttaatagcttcttaggagaatgacaaaaaaaaaaaa

SEQ ID NO: 280 - protein, 1273 aa, Artificial Sequence
  Spike Protein
MFVFLVLLPLVSSQCVNLTTRTQLPPAYTNSFTRGVYYPDKVFRSSVLHSTQDLFLPFFSNVTWFHAIHVSGTNGTKRFDNPVLPFNDGVYFASTEKSNIIRGWIFGTTLDSKTQSLLIVNNATNVVIKVCEFQFCNDPFLGVYYHKNNKSWMESEFRVYSSANNCTFEYVSQPFLMDLEGKQGNFKNLREFVFKNIDGYFKIYSKHTPINLVRDLPQGFSALEPLVDLPIGINITRFQTLLALHRSYLTPGDSSSGWTAGAAAYYVGYLQPRTFLLKYNENGTITDAVDCALDPLSETKCTLKSFTVEKGIYQTSNFRVQPTESIVRFPNITNLCPFGEVFNATRFASVYAWNRKRISNCVADYSVLYNSASFSTFKCYGVSPTKLNDLCFTNVYADSFVIRGDEVRQIAPGQTGKIADYNYKLPDDFTGCVIAWNSNNLDSKVGGNYNYLYRLFRKSNLKPFERDISTEIYQAGSTPCNGVEGFNCYFPLQSYGFQPTNGVGYQPYRVVVLSFELLHAPATVCGPKKSTNLVKNKCVNFNFNGLTGTGVLTESNKKFLPFQQFGRDIADTTDAVRDPQTLEILDITPCSFGGVSVITPGTNTSNQVAVLYQDVNCTEVPVAIHADQLTPTWRVYSTGSNVFQTRAGCLIGAEHVNNSYECDIPIGAGICASYQTQTNSPRRARSVASQSIIAYTMSLGAENSVAYSNNSIAIPTNFTISVTTEILPVSMTKTSVDCTMYICGDSTECSNLLLQYGSFCTQLNRALTGIAVEQDKNTQEVFAQVKQIYKTPPIKDFGGFNFSQILPDPSKPSKRSFIEDLLFNKVTLADAGFIKQYGDCLGDIAARDLICAQKFNGLTVLPPLLTDEMIAQYTSALLAGTITSGWTFGAGAALQIPFAMQMAYRFNGIGVTQNVLYENQKLIANQFNSAIGKIQDSLSSTASALGKLQDVVNQNAQALNTLVKQLSSNFGAISSVLNDILSRLDKVEAEVQIDRLITGRLQSLQTYVTQQLIRAAEIRASANLAATKMSECVLGQSKRVDFCGKGYHLMSFPQSAPHGVVFLHVTYVPAQEKNFTTAPAICHDGKAHFPREGVFVSNGTHWFVTQRNFYEPQIITTDNTFVSGNCDVVIGIVNNTVYDPLQPELDSFKEELDKYFKNHTSPDVDLGDISGINASVVNIQKEIDRLNEVAKNLNESLIDLQELGKYEQYIKWPWYIWLGFIAGLIAIVMVTIMLCCMTSCCSCLKGCCSCGSCCKFDEDDSEPVLKGVKLHYT

SEQ ID NO: 281 - protein, 419 aa, Artificial Sequence
  Nucleocapsid Protein
MSDNGPQNQRNAPRITFGGPSDSTGSNQNGERSGARSKQRRPQGLPNNTASWFTALTQHGKEDLKFPRGQGVPINTNSSPDDQIGYYRRATRRIRGGDGKMKDLSPRWYFYYLGTGPEAGLPYGANKDGIIWVATEGALNTPKDHIGTRNPANNAAIVLQLPQGTTLPKGFYAEGSRGGSQASSRSSSRSRNSSRNSTPGSSRGTSPARMAGNGGDAALALLLLDRLNQLESKMSGKGQQQQGQTVTKKSAAEASKKPRQKRTATKAYNVTQAFGRRGPEQTQGNFGDQELIRQGTDYKHWPQIAQFAPSASAFFGMSRIGMEVTPSGTWLTYTGAIKLDDKDPNFKDQVILLNKHIDAYKTFPPTEPKKDKKKKADETQALPQRQKKQQTVTLLPAADLDDFSKQLQQSMSSADSTQA

SEQ ID NO: 282 - protein, 75 aa, Artificial Sequence
  Envelope Protein
MYSFVSEETGTLIVNSVLLFLAFVVFLLVTLAILTALRLCAYCCNIVNVSLVKPSFYVYSRVKNLNSSRVPDLLV

SEQ ID NO: 283 - protein, 222 aa, Artificial Sequence
  Membrane Protein
MADSNGTITVEELKKLLEQWNLVIGFLFLTWICLLQFAYANRNRFLYIIKLIFLWLLWPVTLACFVLAAVYRINWITGGIAIAMACLVGLMWLSYFIASFRLFARTRSMWSFNPETNILLNVPLHGTILTRPLLESELVIGAVILRGHLRIAGHHLGRCDIKDLPKEITVATSRTLSYYKLGASQRVAGDSGFAAYSRYRIGNYKLNTDHSSSSDNIALLVQ

SEQ ID NO: 284 - protein, 7096 aa, Artificial Sequence [sequence omitted]

SEQ ID NO: 285 - protein, 275 aa, Artificial Sequence
  ORF3a
MDLFMRIFTIGTVTLKQGEIKDATPSDFVRATATIPIQASLPFGWLIVGVALLAVFQSASKIITLKKRWQLALSKGVHFVCNLLLLFVTVYSHLLLVAAGLEAPFLYLYALVYFLQSINFVRIIMRLWLCWKCRSKNPLLYDANYFLCWHTNCYDYCIPYNSVTSSIVITSGDGTTSPISEHDYQIGGYTEKWESGVKDCVVLHSYFTSDYYQLYSTQLSTDTGVEHVTFFIYNKIVDEPEEHVQIHTIDGSSGVVNPVMEPIYDEPTTTTSVPL

SEQ ID NO: 286 - protein, 61 aa, Artificial Sequence
  ORF6
MFHLVDFQVTIAEILLIIMRTFKVSIWNLDYIINLIIKNLSKSLTENKYSQLDEEQPMEID

SEQ ID NO: 287 - protein, 121 aa, Artificial Sequence
  ORF7a
MKIILFLALITLATCELYHYQECVRGTTVLLKEPCSSGTYEGNSPFHPLADNKFALTCFSTQFAFACPDGVKHVYQLRARSVSPKLFIRQEEVQELYSPIFLIVAAIVFITLCFTLKRKTE

SEQ ID NO: 288 - protein, 121 aa, Artificial Sequence
  ORF8
MKFLVFLGIITTVAAFHQECSLQSCTQHQPYVVDDPCPIHFYSKWYIRVGARKSAPLIELCVDEAGSKSPIQYIDIGNYTVSCLPFTINCQEPKLGSLVVRCSFYEDFLEYHDVRVVLDFI

SEQ ID NO: 289 - protein, 38 aa, Artificial Sequence
  ORF10
MGYINVFAFPFTIYSLLLCRMNSRNYIAQVDVVNFNLT

SEQ ID NO: 290 - DNA, 29797 bp, Artificial Sequence
  SARS-CoV-2 variant
  misc_feature (4973)..(5225): n is a, c, g, or t
  misc_feature (13374)..(13380): n is a, c, g, or t
  misc_feature (13544)..(13549): n is a, c, g, or t
  misc_feature (13553)..(13554): n is a, c, g, or t
  misc_feature (27474)..(27545): n is a, c, g, or t
  misc_feature (27559)..(27731): n is a, c, g, or t
actttcgatctcttgtagatctgttctctaaacgaactttaaaatctgtgtggctgtcactcggctgcatgcttagtgcactcacgcagtataattaataactaattactgtcgttgacaggacacgagtaactcgtctatcttctgcaggctgcttacggtttcgtccgtgttgcagccgatcatcagcacatctaggttttgtccgggtgtgaccgaaaggtaagatggagagccttgtccctggtttcaacgagaaaacacacgtccaactcagtttgcctgttttacaggtttgcgacgtgctcgtacgtggctttggagactccgtggaggaggtcttatcagaggcacgtcaacatcttaaagatggcacttgtggcttagtagaagttgaaaaaggcgttttgcctcaacttgaacagccctatgtgttcatcaaacgttcggatgctcgaactgcacctcatggtcatgttatggttgagctggtagcagaactcgaaggcattcagtacggtcgtagtggtgagacacttggtgtccttgtccctcatgtgggcgaaataccagtggcttaccgcaaggttcttcttcgtaagaacggtaataaaggagctggtggccatagttacggcgccgatctaaagtcatttgacttaggcgacgagcttggcactgatccttatgaagattttcaagaaaactggaacactaaacatagcagtggtgttacccgtgaactcatgcgtgagcttaacggaggggcatacactcgctatgtcgataacaacttctgtggccctgatggctaccctcttgagtgcattaaagaccttctagcacgtgctggtaaagcttcatgcactttgtctgaacaactggactttattgacactaagaggggtgtatactgctgccgtgaacatgagcatgaaattgcttggtacacggaacgttctgaaaagagctatgaattgcagacaccttttgaaattaaattggcaaagaaatttgacaccttcaatggggaatgtccaaattttgtatttcccttaaattccataatcaagactattcaaccaagggttgaaaagaaaaagcttgatggctttatgggtagaattcgatctgtctatccagttgcgtcaccaaatgaatgcaaccaaatgtgcctttcaactctcatgaagtgtgatcattgtggtgaaacttcatggcagacgggcgattttgttaaagccacttgcgaattttgtggcactgagaatttgactaaagaaggtgccactacttgtggttacttaccccaaaatgctgttgttaaaatttattgtccagcatgtcacaattcagaagtaggacctgagcatagtcttgccgaataccataatgaatctggcttgaaaaccattcttcgtaagggtggtcgcactattgcctttggaggctgtgtgttctcttatgttggttgccataacaagtgtgcctattgggttccacgtgctagcgctaacataggttgtaaccatacaggtgttgttggagaaggttccgaaggtcttaatgacaaccttcttgaaatactccaaaaagagaaagtcaacatcaatattgttggtgactttaaacttaatgaagagatcgccattattttggcatctttttctgcttccacaagtgcttttgtggaaactgtgaaaggtttggattataaagcattcaaacaaattgttgaatcctgtggtaattttaaagttacaaaaggaaaagctaaaaaaggtgcctggaatattggtgaacagaaatcaatactgagtcctctttatgcatttgcatcagaggctgctcgtgttgtacgatcaattttctcccgcactcttgaaactgctcaaaattctgtgcgtgttttacagaaggccgctataacaatactagatggaatttcacagtattcactgagactcattgatgctatgatgttcacatctgatttggctactaacaatctagttgtaatggcctacattacaggtggtgttgttcagttgacttcgcagtggctaactaacatctttggcactgtttatgaaaaactcaaacccgtccttgattggcttgaagagaagtttaaggaaggtgtagagtttcttagagacggttgggaaattgttaaatttatctcaacctgtgcttgtgaaattgtcggtggacaaattgtcacctgtgcaaaggaaattaaggagagtgttcagacattctttaagcttgtaaataaatttttggctttgtgtgctgactctatcattattggtggagctaaacttaaagccttgaatttaggtgaaacatttgtcacgcactcaaagggattgtacagaaagtgtgttaaatccagagaagaaactggcctactcatgcctctaaaagccccaaaagaaattatcttcttagagggagaaacacttcccacagaagtgttaacagaggaagttgtcttgaaaactggtgatttacaaccattagaacaacctactagtgaagctgttgaagctccattggttggtacaccagtttgtattaacgggcttatgttgctcgaaatcaaagacacagaaaagtactgtgcccttgcacctaatatgatggtaacaaacaataccttcacactcaaaggcggtgcaccaacaaaggttacttttggtgatgacactgtgatagaagtgcaaggttacaagagtgtgaatatcacttttgaacttgatgaaaggattgataaagtacttaatgagaagtgctctgcctatacagttgaactcggtacagaagtaaatgagttcgcctgtgttgtggcagatgctgtcataaaaactttgcaaccagtatctgaattacttacaccactgggcattgatttagatgagtggagtatggctacatactacttatttgatgagtctggtgagtttaaattggcttcacatatgtattgttctttttaccctccagatgaggatgaagaagaaggtgattgtgaagaagaagagtttgagccatcaactcaatatgagtatggtactgaagatgattaccaaggtaaacctttggaatttggtgccacttctgctgctcttcaacctgaagaagagcaagaagaagattggttagatgatgatagtcaacaaactgttggtcaacaagacggcagtgaggacaatcagacaactattattcaaacaattgttgaggttcaacctcaattagagatggaacttacaccagttgttcagactattgaagtgaatagttttagtggttatttaaaacttactgacaatgtatacattaaaaatgcagacattgtggaagaagctaaaaaggtaaaaccaacagtggttgttaatgcagccaatgtttaccttaaacatggaggaggtgttgcaggagccttaaataaggctactaacaatgccatgcaagttgaatctgatgattacatagctactaatggaccacttaaagtgggtggtagttgtgttttaagcggacacaatcttgctaaacactgtcttcatgttgtcggcccaaatgttaacaaaggtgaagacattcaacttcttaagagtgcttatgaaaattttaatcagcacgaagttctacttgcaccattattatcagctggtatttttggtgctgaccctatacattctttaagagtttgtgtagatactgttcgcacaaatgtctacttagctgtctttgataaaaatctctatgacaaacttgtttcaagctttttggaaatgaagagtgaaaagcaagttgaacaaaagatcgctgagattcctaaagaggaagttaagccatttataactgaaagtaaaccttcagttgaacagagaaaacaagatgataagaaaatcaaagcttgtgttgaagaagttacaacaactctggaagaaactaagttcctcacagaaaacttgttactttatattgacattaatggcaatcttcatccagattctgccactcttgttagtgacattgacatcactttcttaaagaaagatgctccatatatagtgggtgatgttgttcaagagggtgttttaactgctgtggttatacctactaaaaaggctggtggcactactgaaatgctagcgaaagctttgagaaaagtgccaacagacaattatataaccacttacccgggtcagggtttaaatggttacactgtagaggaggcaaagacagtgcttaaaaagtgtaaaagtgccttttacattctaccatctattatctctaatgagaagcaagaaattcttggaactgtttcttggaatttgcgagaaatgcttgcacatgcagaagaaacacgcaaattaatgcctgtctgtgtggaaactaaagccatagtttcaactatacagcgtaaatataagggtattaaaatacaagagggtgtggttgattatggtgctagattttacttttacaccagtaaaacaactgtagcgtcacttatcaacacacttaacgatctaaatgaaactcttgttacaatgccacttggctatgtaacacatggcttaaatttggaagaagctgctcggtatatgagatctctcaaagtgccagctacagtttctgtttcttcacctgatgctgttacagcgtataatggttatcttacttcttcttctaaaacacctgaagaacattttattgaaaccatctcacttgctggttcctataaagattggtcctattctggacaatctacacaactaggtatagaatttcttaagagaggtgataaaagtgtatattacactagtaatcctaccacattccacctagatggtgaagttatcacctttgacaatcttaagacacttctttctttgagagaagtgagggctattaaggtgtttacaacagtagacaacattaacctccacacgcannnnnnnnnnnnnnnnnnnnnnnnnnnnnnnnnnnnnnnnnnnnnnnnnnnnnnnnnnnnnnnnnnnnnnnnnnnnnnnnnnnnnnnnnnnnnnnnnnnnnnnnnnnnnnnnnnnnnnnnnnnnnnnnnnnnnnnnnnnnnnnnnnnnnnnnnnnnnnnnnnnnnnnnnnnnnnnnnnnnnnnnnnnnnnnnnnnnnnnnnnnnnnnnnnnnnnnnnnnnnnnnnnnnnnnnnnnnnnnnnnnnnnnnnnnnnattaaatgggcagataacaactgttatcttgccactgcattgttaacactccaacaaatagagttgaagtttaatccacctgctctacaagatgcttattacagagcaagggctggtgaagctgataacttttgtgcacttatcttagcctactgtaataagacagtaggtgagttaggtgatgttagagaaacaatgagttacttgtttcaacatgccaatttagattcttgcaaaagagtcttgaacgtggtgtgtaaaacttgtggacaacagcagacaacccttaagggtgtagaagctgttatgtacatgggcacactttcttatgaacaatttaagaaaggtgttcagataccttgtacgtgtggtaaacaagctacaaaatatctagtacaacaggagtcaccttttgttatgatgtcagcaccacctgctcagtatgaacttaagcatggtacatttacttgtgctagtgagtacactggtaattaccagtgtggtcactataaacatataacttctaaagaaactttgtattgcatagacggtgctttacttacaaagtcctcagaatacaaaggtcctattacggatgttttctacaaagaaaacagttacacaacaaccataaaaccagttacttataaattggatggtgttgtttgtacagaaattgaccctaagttggacaattattataagaaagacaattcttattttacagagcaaccaattgatcttgtaccaaaccaaccatatccaaacgcaagcttcgataattttaagtttgtatgtgataatatcaaatttgctgatgatttaaaccagttaactggttataagaaacctgcttcaagagagcttaaagttacatttttccctgacttaaatggtgatgtggtggctattgattataaacactacacaccctcttttaagaaaggagctaaattgttacataaacctattgtttggcatgttaacaatgcaactaataaagccacgtataaaccaaatacctggtgtatacgttgtctttggagcacaaaaccagttgaaacatcaaattcgtttgatgtactgaagtcagaggacgcgcagggaatggataatcttgcctgcgaagatctaaaaccagtctctgaagaagtagtggaaaatcctaccatacagaaagacgttcttgagtgtaatgtgaaaactaccgaagttgtaggagacattatacttaaaccagcaaataatagtttaaaaattacagaagaggttggccacacagatctaatggctgcttatgtagacaattctagtcttactattaagaaacctaatgaattatctagagtattaggtttgaaaacccttgctactcatggtttagctgctgttaatagtgtcccttgggatactatagctaattatgctaagccttttcttaacaaagttgttagtacaactactaacatagttacacggtgtttaaaccgtgtttgtactaattatatgccttatttctttactttattgctacaattgtgtacttttactagaagtacaaattctagaattaaagcatctatgccgactactatagcaaagaatactgttaagagtgtcggtaaattttgtctagaggcttcatttaattatttgaagtcacctaatttttctaaactgataaatattacaatttggtttttactattaagtgtttgcctaggttctttaatctactcaaccgctgctttaggtgttttaatgtctaatttaggcatgccttcttactgtactggttacagagaaggctatttgaactctactaatgtcactattgcaacctactgtactggttctataccttgtagtgtttgtcttagtggtttagattctttagacacctatccttctttagaaactatacaaattaccatttcatcttttaaatgggatttaactgtttttggcttagttgcagagtggtttttggcatatattcttttcactaggtttttctatgtacttggattggctgcaatcatgcaattgtttttcagctattttgcagtacattttattagtaattcttggcttatgtggttaataattaatcttgtacaaatggccccgatttcagctatggttagaatgtacatcttctttgcatcattttattatgtatggaaaagttatgtgcatgttgtagacggttgtaattcatcaacttgtatgatgtgttacaaacgtaatagagcaacaagagtcgaatgtacaactattgttaatggtgttagaaggtccttttatgtctatgctaatggaggtaaaggcttttgcaaactacacaattggaattgtgttaattgtgatacattctgtgctggtagtacatttattagtgatgaagttgcgagagacttgtcactacagtttaaaagaccaataaatcctactgaccagtcttcttacatcgttgatagtgttacagtgaagaatggttccatccatctttactttgataaagctggtcaaaagacttatgaaagacattctctctctcattttgttaacttagacaacctgagagctaataacactaaaggttcattgcctattaatgttatagtttttgatggtaaatcaaaatgtgaagaatcatctgcaaaatcagcgtctgtttactacagtcagcttatgtgtcaacctatactgttactagatcaggcattagtgtctgatgttggtgatagtgcggaagttgcagttaaaatgtttgatgcttacgttaatacgttttcatcaacttttaacgtaccaatggaaaaactcaaaacactagttgcaactgcagaagctgaacttgcaaagaatgtgtccttagacaatgtcttatctacttttatttcagcagctcggcaagggtttgttgattcagatgtagaaactaaagatgttgttgaatgtcttaaattgtcacatcaatctgacatagaagttactggcgatagttgtaataactatatgctcacctataacaaagttgaaaacatgacaccccgtgaccttggtgcttgtattgactgtagtgcgcgtcatattaatgcgcaggtagcaaaaagtcacaacattgctttgatatggaacgttaaagatttcatgtcattgtctgaacaactacgaaaacaaatacgtagtgctgctaaaaagaataacttaccttttaagttgacatgtgcaactactagacaagttgttaatgttgtaacaacaaagatagcacttaagggtggtaaaattgttaataattggttgaagcagttaattaaagttacacttgtgttcctttttgttgctgctattttctatttaataacacctgttcatgtcatgtctaaacatactgacttttcaagtgaaatcataggatacaaggctattgatggtggtgtcactcgtgacatagcatctacagatacttgttttgctaacaaacatgctgattttgacacatggtttagccagcgtggtggtagttatactaatgacaaagcttgcccattgattgctgcagtcataacaagagaagtgggttttgtcgtgcctggtttgcctggcacgatattacgcacaactaatggtgactttttgcatttcttacctagagtttttagtgcagttggtaacatctgttacacaccatcaaaacttatagagtacactgactttgcaacatcagcttgtgttttggctgctgaatgtacaatttttaaagatgcttctggtaagccagtaccatattgttatgataccaatgtactagaaggttctgttgcttatgaaagtttacgccctgacacacgttatgtgctcatggatggctctattattcaatttcctaacacctaccttgaaggttctgttagagtggtaacaacttttgattctgagtactgtaggcacggcacttgtgaaagatcagaagctggtgtttgtgtatctactagtggtagatgggtacttaacaatgattattacagatctttaccaggagttttctgtggtgtagatgctgtaaatttacttactaatatgtttacaccactaattcaacctattggtgctttggacatatcagcatctatagtagctggtggtattgtagctatcgtagtaacatgccttgcctactattttatgaggtttagaagagcttttggtgaatacagtcatgtagttgcctttaatactttactattccttatgtcattcactgtactctgtttaacaccagtttactcattcttacctggtgtttattctgttatttacttgtacttgacattttatcttactaatgatgtttcttttttagcacatattcagtggatggttatgttcacacctttagtacctttctggataacaattgcttatatcatttgtatttccacaaagcatttctattggttctttagtaattacctaaagagacgtgtagtctttaatggtgtttcctttagtacttttgaagaagctgcgctgtgcacctttttgttaaataaagaaatgtatctaaagttgcgtagtgatgtgctattacctcttacgcaatataatagatacttagctctttataataagtacaagtattttagtggagcaatggatacaactagctacagagaagctgcttgttgtcatctcgcaaaggctctcaatgacttcagtaactcaggttctgatgttctttaccaaccaccacaaacctctatcacctcagctgttttgcagagtggttttagaaaaatggcattcccatctggtaaagttgagggttgtatggtacaagtaacttgtggtacaactacacttaacggtctttggcttgatgacgtagtttactgtccaagacatgtgatctgcacctctgaagacatgcttaaccctaattatgaagatttactcattcgtaagtctaatcataatttcttggtacaggctggtaatgttcaactcagggttattggacattctatgcaaaattgtgtacttaagcttaaggttgatacagccaatcctaagacacctaagtataagtttgttcgcattcaaccaggacagactttttcagtgttagcttgttacaatggttcaccatctggtgtttaccaatgtgctatgaggcccaatttcactattaagggttcattccttaatggttcatgtggtagtgttggttttaacatagattatgactgtgtctctttttgttacatgcaccatatggaattaccaactggagttcatgctggcacagacttagaaggtaacttttatggaccttttgttgacaggcaaacagcacaagcagctggtacggacacaactattacagttaatgttttagcttggttgtacgctgctgttataaatggagacaggtggtttctcaatcgatttaccacaactcttaatgactttaaccttgtggctatgaagtacaattatgaacctctaacacaagaccatgttgacatactaggacctctttctgctcaaactggaattgccgttttagatatgtgtgcttcattaaaagaattactgcaaaatggtatgaatggacgtaccatattgggtagtgctttattagaagatgaatttacaccttttgatgttgttagacaatgctcaggtgttactttccaaagtgcagtgaaaagaacaatcaagggtacacaccactggttgttactcacaattttgacttcacttttagttttagtccagagtactcaatggtctttgttcttttttttgtatgaaaatgcctttttaccttttgctatgggtattattgctatgtctgcttttgcaatgatgtttgtcaaacataagcatgcatttctctgtttgtttttgttaccttctcttgccactgtagcttattttaatatggtctatatgcctgctagttgggtgatgcgtattatgacatggttggatatggttgatactagtttgaagctaaaagactgtgttatgtatgcatcagctgtagtgttactaatccttatgacagcaagaactgtgtatgatgatggtgctaggagagtgtggacacttatgaatgtcttgacactcgtttataaagtttattatggtaatgctttagatcaagccatttccatgtgggctcttataatctctgttacttctaactactcaggtgtagttacaactgtcatgtttttggccagaggtattgtttttatgtgtgttgagtattgccctattttcttcataactggtaatacacttcagtgtataatgctagtttattgtttcttaggctatttttgtacttgttactttggcctcttttgtttactcaaccgctactttagactgactcttggtgtttatgattacttagtttctacacaggagtttagatatatgaattcacagggactactcccacccaagaatagcatagatgccttcaaactcaacattaaattgttgggtgttggtggcaaaccttgtatcaaagtagccactgtacagtctaaaatgtcagatgtaaagtgcacatcagtagtcttactctcagttttgcaacaactcagagtagaatcatcatctaaattgtgggctcaatgtgtccagttacacaatgacattctcttagctaaagatactactgaagcctttgaaaaaatggtttcactactttctgttttgctttccatgcagggtgctgtagacataaacaagctttgtgaagaaatgctggacaacagggcaaccttacaagctatagcctcagagtttagttcccttccatcatatgcagcttttgctactgctcaagaagcttatgagcgggctgttgctaatggtgattctgaagttgttcttaaaaagttgaagaagtctttgaatgtggctaaatctgaatttgaccgtgatgcagccatgcaacgtaagttggaaaagatggctgatcaagctatgacccaaatgtataaacaggctagatctgaggacaagagggcaaaagttactagtgctatgcagacaatgcttttcactatgcttagaaagttggataatgatgcactcaacaacattatcaacaatgcaagagatggttgtgttcccttgaacataatacctcttacaacagcagccaaactaatggttgtcataccagactataacacatataaaaatacgtgtgatggtacaacatttacttatgcatcagcattgtgggaaatccaacaggttgtagatgcagatagtaaaattgttcaacttagtgaaattagtatggacaattcacctaatttagcatggcctcttattgtaacagctttaagggccaattctgctgtcaaattacagaataatgagcttagtcctgttgcactacgacagatgtcttgtgctgccggtactacacaaactgcttgcactgatgacaatgcgttagcttactacaacacaacaaagggaggtaggtttgtacttgcactgttatccgatttacaggatttgaaatgggctagattccctaagagtgatggaactggtactatctatacagaactggaaccaccttgtaggtttgttacagacacacctaaaggtcctaaagtgaagtatttatactttattaaaggattaaacaacctaaatagaggtatggtacttggtagtttagctgccacagtacgtctacaagctggtaatgcaacagaagtgcctgccaattcaactgtattatctttctgtgcttttgctgtagatgctgctaaagcttacaaagattatctagctagtgggggacaaccaatcactaattgtgttaagatgttgtgtacacacactggtactggtcaggcaataacagttacaccggaagccaatatggatcaagaatcctttggtggtgcatcgtgttgtctgtactgccgttgccacatagatcatccaaatcctaaaggattttgtgacttaaaaggtaagtatgtacaaatacctacaacttgtgctaatgaccctgtgggttttacacttaaaaacacagtctgtaccgtctgcggtatgtggaaaggttatggctgtagttgtgatcaannnnnnnaacccatgcttcagtcagctgatgcacaatcgtttttaaacgggtttgcggtgtaagtgcagcccgtcttacaccgtgcggcacaggcactagtactgatgtcgtatacagggcttttgacatctacaatgataaagtagctggttttgctaaattcctaaaannnnnntgtnntcgcttccaagaaaaggacgaagatgacaatttaattgattcttactttgtagttaagagacacactttctctaactaccaacatgaagaaacaatttataatttacttaaggattgtccagctgttgctaaacatgacttctttaagtttagaatagacggtgacatggtaccacatatatcacgtcaacgtcttactaaatacacaatggcagacctcgtctatgctttaaggcattttgatgaaggtaattgtgacacattaaaagaaatacttgtcacatacaattgttgtgatgatgattatttcaataaaaaggactggtatgattttgtagaaaacccagatatattacgcgtatacgccaacttaggtgaacgtgtacgccaagctttgttaaaaacagtacaattctgtgatgccatgcgaaatgctggtattgttggtgtactgacattagataatcaagatctcaatggtaactggtatgatttcggtgatttcatacaaaccacgccaggtagtggagttcctgttgtagattcttattattcattgttaatgcctatattaaccttgaccagggctttaactgcagagtcacatgttgacactgacttaacaaagccttacattaagtgggatttgttaaaatatgacttcacggaagagaggttaaaactctttgaccgttattttaaatattgggatcagacataccacccaaattgtgttaactgtttggatgacagatgcattctgcattgtgcaaactttaatgttttattctctacagtgttcccacttacaagttttggaccactagtgagaaaaatatttgttgatggtgttccatttgtagtttcaactggataccacttcagagagctaggtgttgtacataatcaggatgtaaacttacatagctctagacttagttttaaggaattacttgtgtatgctgctgaccctgctatgcacgctgcttctggtaatctattactagataaacgcactacgtgcttttcagtagctgcacttactaacaatgttgcttttcaaactgtcaaacctggtaattttaacaaagacttctatgactttgctgtgtctaagggtttctttaaggaaggaagttctgttgaattaaaacacttcttctttgctcaggatggtaatgctgctatcagcgattatgactactatcgttataatctaccaacaatgtgtgatatcagacaactactatttgtagttgaagttgttgataagtactttgattgttacgatggtggctgtattaatgctaaccaagtcatcgtcaacaacctagacaaatcagctggttttccatttaataaatggggtaaggctagactttattatgattcaatgagttatgaggatcaagatgcacttttcgcatatacaaaacgtaatgtcatccctactataactcaaatgaatcttaagtatgccattagtgcaaagaatagagctcgcaccgtagctggtgtctctatctgtagtactatgaccaatagacagtttcatcaaaaattattgaaatcaatagccgccactagaggagctactgtagtaattggaacaagcaaattctatggtggttggcacaacatgttaaaaactgtttatagtgatgtagaaaaccctcatcttatgggttgggattatcctaaatgtgatagagccatgcctaacatgcttagaattatggcctcacttgttcttgctcgcaaacatacaacgtgttgtagcttgtcacaccgtttctatagattagctaatgagtgtgctcaagtattgagtgaaatggtcatgtgtggcggttcactatatgttaaaccaggtggaacctcatcaggagatgccacaactgcttatgctaatagtgtttttaacatttgtcaagctgtcacggccaatgttaatgcacttttatctactgatggtaacaaaattgccgataagtatgtccgcaatttacaacacagactttatgagtgtctctatagaaatagagatgttgacacagactttgtgaatgagttttacgcatatttgcgtaaacatttctcaatgatgatactctctgacgatgctgttgtgtgtttcaatagcacttatgcatctcaaggtctagtggctagcataaagaactttaagtcagttctttattatcaaaacaatgtttttatgtctgaagcaaaatgttggactgagactgaccttactaaaggacctcatgaattttgctctcaacatacaatgctagttaaacagggtgatgattatgtgtaccttccttacccagatccatcaagaatcctaggggccggctgttttgtagatgatatcgtaaaaacagatggtacacttatgattgaacggttcgtgtctttagctatagatgcttacccacttactaaacatcctaatcaggagtatgctgatgtctttcatttgtacttacaatacataagaaagctacatgatgagttaacaggacacatgttagacatgtattctgttatgcttactaatgataacacctcaaggtattgggaacctgagttttatgaggctatgtacacaccgcatacagtcttacaggctgttggggcttgtgttctttgcaattcacagacttcattaagatgtggtgcttgcatacgtagaccattcttatgttgtaaatgctgttacgaccatgtcatatcaacatcacataaattagtcttgtctgttaatccgtatgtttgcaatgctccaggttgtgatgtcacagatgtgactcaactttacttaggaggtatgagctattattgtaaatcacataaaccacccattagttttccattgtgtgctaatggacaagtttttggtttatataaaaatacatgtgttggtagcgataatgttactgactttaatgcaattgcaacatgtgactggacaaatgctggtgattacattttagctaacacctgtactgaaagactcaagctttttgcagcagaaacgctcaaagctactgaggagacatttaaactgtcttatggtattgctactgtacgtgaagtgctgtctgacagagaattacatctttcatgggaagttggtaaacctagaccaccacttaaccgaaattatgtctttactggttatcgtgtaactaaaaacagtaaagtacaaataggagagtacacctttgaaaaaggtgactatggtgatgctgttgtttaccgaggtacaacaacttacaaattaaatgttggtgattattttgtgctgacatcacatacagtaatgccattaagtgcacctacactagtgccacaagagcactatgttagaattactggcttatacccaacactcaatatctcagatgagttttctagcaatgttgcaaattatcaaaaggttggtatgcaaaagtattctacactccagggaccacctggtactggtaagagtcattttgctattggcctagctctctactacccttctgctcgcatagtgtatacagcttgctctcatgccgctgttgatgcactatgtgagaaggcattaaaatatttgcctatagataaatgtagtagaattatacctgcacgtgctcgtgtagagtgttttgataaattcaaagtgaattcaacattagaacagtatgtcttttgtactgtaaatgcattgcctgagacgacagcagatatagttgtctttgatgaaatttcaatggccacaaattatgatttgagtgttgtcaatgccagattacgtgctaagcactatgtgtacattggcgaccctgctcaattacctgcaccacgcacattgctaactaagggcacactagaaccagaatatttcaattcagtgtgtagacttatgaaaactataggtccagacatgttcctcggaacttgtcggcgttgtcctgctgaaattgttgacactgtgagtgctttggtttatgataataggcttaaagcacataaagacaaatcagctcaatgctttaaaatgttttataagggtgttatcacgcatgatgtttcatctgcaattaacaggccacaaataggcgtggtaagagaattccttacacgtaaccctgcttggagaaaagctgtctttatttcaccttataattcacagaatgctgtagcctcaaagattttgggactaccaactcaaactgttgattcatcacagggctcagaatatgactatgtcatattcactcaaaccactgaaacagctcactcttgtaatgtaaacagatttaatgttgctattaccagagcaaaagtaggcatactttgcataatgtctgatagagacctttatgacaagttgcaatttacaagtcttgaaattccacgtaggaatgtggcaactttacaagctgaaaatgtaacaggactctttaaagattgtagtaaggtaatcactgggttacatcctacacaggcacctacacacctcagtgttgacactaaattcaaaactgaaggtttatgtgttgacatacctggcatacctaaggacatgacctatagaagactcatctctatgatgggttttaaaatgaattatcaagttaatggttaccctaacatgtttatcacccgcgaagaagctataagacatgtacgtgcatggattggcttcgatgtcgaggggtgtcatgctactagagaagctgttggtaccaatttacctttacagctaggtttttctacaggtgttaacctagttgctgtacctacaggttatgttgatacacctaataatacagatttttccagagttagtgctaaaccaccgcctggagatcaatttaaacacctcataccacttatgtacaaaggacttccttggaatgtagtgcgtataaagattgtacaaatgttaagtgacacacttaaaaatctctctgacagagtcgtatttgtcttatgggcacatggctttgagttgacatctatgaagtattttgtgaaaataggacctgagcgcacctgttgtctatgtgatagacgtgccacatgcttttccactgcttcagacacttatgcctgttggcatcattctattggatttgattacgtctataatccgtttatgattgatgttcaacaatggggttttacaggtaacctacaaagcaaccatgatctgtattgtcaagtccatggtaatgcacatgtagctagttgtgatgcaatcatgactaggtgtctagctgtccacgagtgctttgttaagcgtgttgactggactattgaatatcctataattggtgatgaactgaagattaatgcggtttgtagaaaggttcaacacatggttgttaaagctgcattattagcagacaaattcccagttcttcacgacattggtaaccctaaagctattaagtgtgtacctcaagctgatgtagaatggaagttctatgatgcacagccttgtagtgacaaagcttataaaatagaagaattattctattcttatgccacacattctgacaaattcacagatggtgtatgcctattttggaattgcaatgtcgatagatatcctgctaattccattgtttgtagatttgacactagagtgctatctaaccttaacttgcctggttgtgatggtggcagtttgtatgtaaataaacatgcattccacacaccagcttttgataaaagtgcttttgttaatttaaaacaattaccatttttctattactctgacagtccatgtgagtctcatggaaaacaagtagtgtcagatatagattatgtaccactaaagtctgctacgtgtataacacgttgcaatttaggtggtgctgtctgtagacatcatgctaatgagtacagattgtatctcgatgcttataacatgatgatctcagctggctttagcttgtgggtttacaaacaatttgatacttataacctctggaacacttttacaagacttcagagtttagaaaatgtggcttttaatgttgtaaataagggacactttgatggacaacagggtgaagtaccagtttctatcattaataacactgtttacacaaaagttgatggtgttgatgtagaattgtttgaaaataaaacaacattacctgttaatgtagcatttgagctttgggctaagcgcaacattaaaccagtaccagaggtgaaaatactcaataatttgggtgtggacattgctgctaatactgtgatctgggactacaaaagagatgctccagcacatatatctactattggtgtttgttctatgactgacatagccaagaaaccaactgaaacgatttgtgcaccactcactgtcttttttgatggtagagttgatggtcaagtagacttatttagaaatgcccgtaatggtgttcttattacagaaggtagtgttaaaggtttacaaccatctgtaggtcccaaacaagctagtcttaatggagtcacattaattggagaagccgtaaaaacacagttcaattattataagaaagttgatggtgttgtccaacaattacctgaaacttactttactcagagtagaaatttacaagaatttaaacccaggagtcaaatggaaattgatttcttagaattagctatggatgaattcattgaacggtataaattagaaggctatgccttcgaacatatcgtttatggagattttagtcatagtcagttaggtggtttacatctactgattggactagctaaacgttttaaggaatcaccttttgaattagaagattttattcctatggacagtacagttaaaaactatttcataacagatgcgcaaacaggttcatctaagtgtgtgtgttctgttattgatttattacttgatgattttgttgaaataataaaatcccaagatttatctgtagtttctaaggttgtcaaagtgactattgactatacagaaatttcatttatgctttggtgtaaagatggccatgtagaaacattttacccaaaattacaatctagtcaagcgtggcaaccgggtgttgctatgcctaatctttacaaaatgcaaagaatgctattagaaaagtgtgaccttcaaaattatggtgatagtgcaacattacctaaaggcataatgatgaatgtcgcaaaatatactcaactgtgtcaatatttaaacacattaacattagctgtaccctataatatgagagttatacattttggtgctggttctgataaaggagttgcaccaggtacagctgttttaagacagtggttgcctacgggtacgctgcttgtcgattcagatcttaatgactttgtctctgatgcagattcaactttgattggtgattgtgcaactgtacatacagctaataaatgggatctcattattagtgatatgtacgaccctaagactaaaaatgttacaaaagaaaatgactctaaagagggttttttcacttacatttgtgggtttatacaacaaaagctagctcttggaggttccgtggctataaagataacagaacattcttggaatgctgatctttataagctcatgggacacttcgcatggtggacagcctttgttactaatgtgaatgcgtcatcatctgaagcatttttaattggatgtaattatcttggcaaaccacgcgaacaaatagatggttatgtcatgcatgcaaattacatattttggaggaatacaaatccaattcagttgtcttcctattctttatttgacatgagtaaatttccccttaaattaaggggtactgctgttatgtctttaaaagaaggtcaaatcaatgatatgattttatctcttcttagtaaaggtagacttataattagagaaaacaacagagttgttatttctagtgatgttcttgttaacaactaaacgaacaatgtttgtttttcttgttttattgccactagtctctagtcagtgtgttaatcttacaaccagaactcaattaccccctgcatacactaattctttcacacgtggtgtttattaccctgacaaagttttcagatcctcagttttacattcaactcaggacttgttcttacctttcttttccaatgttacttggttccatgctatctctgggaccaatggtactaagaggtttgataaccctgtcctaccatttaatgatggtgtttattttgcttccactgagaagtctaacataataagaggctggatttttggtactactttagattcgaagacccagtccctacttattgttaataacgctactaatgttgttattaaagtctgtgaatttcaattttgtaatgatccatttttgggtgtttaccacaaaaacaacaaaagttggatggaaagtgagttcagagtttattctagtgcgaataattgcacttttgaatatgtctctcagccttttcttatggaccttgaaggaaaacagggtaatttcaaaaatcttagggaatttgtgtttaagaatattgatggttattttaaaatatattctaagcacacgcctattaatttagtgcgtgatctccctcagggtttttcggctttagaaccattggtagatttgccaataggtattaacatcactaggtttcaaactttacttgctttacatagaagttatttgactcctggtgattcttcttcaggttggacagctggtgctgcagcttattatgtgggttatcttcaacctaggacttttctattaaaatataatgaaaatggaaccattacagatgctgtagactgtgcacttgaccctctctcagaaacaaagtgtacgttgaaatccttcactgtagaaaaaggaatctatcaaacttctaactttagagtccaaccaacagaatctattgttagatttcctaatattacaaacttgtgcccttttggtgaagtttttaacgccaccagatttgcatctgtttatgcttggaacaggaagagaatcagcaactgtgttgctgattattctgtcctatataattccgcatcattttccacttttaagtgttatggagtgtctcctactaaattaaatgatctctgctttactaatgtctatgcagattcatttgtaattagaggtgatgaagtcagacaaatcgctccagggcaaactggaaagattgctgattataattataaattaccagatgattttacaggctgcgttatagcttggaattctaacaatcttgattctaaggttggtggtaattataattacctgtatagattgtttaggaagtctaatctcaaaccttttgagagagatatttcaactgaaatctatcaggccggtagcacaccttgtaatggtgttgaaggttttaattgttactttcctttacaatcatatggtttccaacccacttatggtgttggttaccaaccatacagagtagtagtactttcttttgaacttctacatgcaccagcaactgtttgtggacctaaaaagtctactaatttggttaaaaacaaatgtgtcaatttcaacttcaatggtttaacaggcacaggtgttcttactgagtctaacaaaaagtttctgcctttccaacaatttggcagagacattgatgacactactgatgctgtccgtgatccacagacacttgagattcttgacattacaccatgttcttttggtggtgtcagtgttataacaccaggaacaaatacttctaaccaggttgctgttctttatcagggtgttaactgcacagaagtccctgttgctattcatgcagatcaacttactcctacttggcgtgtttattctacaggttctaatgtttttcaaacacgtgcaggctgtttaataggggctgaacatgtcaacaactcatatgagtgtgacatacccattggtgcaggtatatgcgctagttatcagactcagactaattctcgtcggcgggcacgtagtgtagctagtcaatccatcattgcctacactatgtcacttggtgcagaaaattcagttgcttactctaataactctattgccatacccataaattttactattagtgttaccacagaaattctaccagtgtctatgaccaagacatcagtagattgtacaatgtacatttgtggtgattcaactgaatgcagcaatcttttgttgcaatatggcagtttttgtacacaattaaaccgtgctttaactggaatagctgttgaacaagacaaaaacacccaagaagtttttgcacaagtcaaacaaatttacaaaacaccaccaattaaagattttggtggttttaatttttcacaaatattaccagatccatcaaaaccaagcaagaggtcatttattgaagatctacttttcaacaaagtgacacttgcagatgctggcttcatcaaacaatatggtgattgccttggtgatattgctgctagagacctcatttgtgcacaaaagtttaacggccttactgttttgccacctttgctcacagatgaaatgattgctcaatacacttctgcactgttagcgggtacaatcacttctggttggacctttggtgcaggtgctgcattacaaataccatttgctatgcaaatggcttataggtttaatggtattggagttacacagaatgttctctatgagaaccaaaaattgattgccaaccaatttaatagtgctattggcaaaattcaagactcactttcttccacagcaagtgcacttggaaaacttcaagatgtggtcaaccaaaatgcacaagctttaaacacgcttgttaaacaacttagctccaattttggtgcaatttcaagtgttttaaatgatatccttgcacgtcttgacaaagttgaggctgaagtgcaaattgataggttgatcacaggcagacttcaaagtttgcagacatatgtgactcaacaattaattagagctgcagaaatcagagcttctgctaatcttgctgctactaaaatgtcagagtgtgtacttggacaatcaaaaagagttgatttttgtggaaagggctatcatcttatgtccttccctcagtcagcacctcatggtgtagtcttcttgcatgtgacttatgtccctgcacaagaaaagaacttcacaactgctcctgccatttgtcatgatggaaaagcacactttcctcgtgaaggtgtctttgtttcaaatggcacacactggtttgtaacacaaaggaatttttatgaaccacaaatcattactacacacaacacatttgtgtctggtaactgtgatgttgtaataggaattgtcaacaacacagtttatgatcctttgcaacctgaattagactcattcaaggaggagttagataaatattttaagaatcatacatcaccagatgttgatttaggtgacatctctggcattaatgcttcagttgtaaacattcaaaaagaaattgaccgcctcaatgaggttgccaagaatttaaatgaatctctcatcgatctccaagaacttggaaagtatgagcagtatataaaatggccatggtacatttggctaggttttatagctggcttgattgccatagtaatggtgacaattatgctttgctgtatgaccagttgctgtagttgtctcaagggctgttgttcttgtggatcctgctgcaaatttgatgaagacgactctgagccagtgctcaaaggagtcaaattacattacacataaacgaacttatggatttgtttatgagaatcttcacaattggaactgtaactttgaagcaaggtgaaatcaaggatgctactccttcagattttgttcgcgctactgcaacgataccgatacaagcctcactccctttcggatggcttattgttggcgttgcacttcttgctgtttttcagagcgcttccaaaatcataaccctcaaaaagagatggcaactagcactctccaagggtgttcactttgtttgcaacttgctgttgttgtttgtaacagtttactcacaccttttgctcgttgctgctggccttgaagccccttttctctatctttatgctttagtctacttcttgcagagtataaactttgtaagaataataatgaggctttggctttgctggaaatgccgttccaaaaacccattactttatgatgccaactattttctttgctggcatactaattgttacgactattgtataccttacaatagtgtaacttcttcaattgtcattacttcaggtgatggcacaacaagtcctatttctgaacatgactaccagattggtggttatactgaaaaatgggaatctggagtaaaagactgtgttgtattacacagttacttcacttcagactattaccagctgtactcaactcaattgagtacagacactggtgttgaacatgttaccttcttcatctacaataaaattgttgatgagcctgaagaacatgtccaaattcacacaatcgacggttcatccggagttgttaatccagtaatggaaccaatttatgatgaaccgacgacgactactagcgtgcctttgtaagcacaagctgatgagtacgaacttatgtactcattcgtttcggaagagacaggtacgttaatagttaatagcgtacttctttttcttgctttcgtggtattcttgctagttacactagccatccttactgcgcttcgattgtgtgcgtactgctgcaatattgttaacgtgagtcttgtaaaaccttctttttacgtttactctcgtgttaaaaatctgaattcttctagagttcctgatcttctggtctaaacgaactaaatattatattagtttttctgtttggaactttaattttagccatggcagattccaacggtactattaccgttgaagagcttaaaaagctccttgaacaatggaacctagtaataggtttcctattccttacatggatttgtcttctacaatttgcctatgccaacaggaataggtttttgtatataattaagttaattttcctctggctgttatggccagtaactttagcttgttttgtgcttgctgctgtttacagaataaattggatcaccggtggaattgctatcgcaatggcttgtcttgtaggcttgatgtggctcagctacttcattgcttctttcagactgtttgcgcgtacgcgttccatgtggtcattcaatccagaaactaacattcttctcaacgtgccactccatggcactattctgaccagaccgcttctagaaagtgaactcgtaatcggagctgtgatccttcgtggacatcttcgtattgctggacaccatctaggacgctgtgacatcaaggacctgcctaaagaaatcactgttgctacatcacgaacgctttcttattacaaattgggagcttcgcagcgtgtagcaggtgactcaggttttgctgcatacagtcgctacaggattggcaactataaattaaacacagaccattccagtagcagtgacaatattgctttgcttgtacagtaagtgacaacagatgtttcatctcgttgactttcaggttactatagcagagatattactaattattatgaggacttttaaagtttccatttggaatcttgattacatcataaacctcataattaaaaatttatctaagtcactaactgagaataaatattctcaattagatgaagagcaaccaatggagattgattaaacgaacatgaaaattattcttttcttggcactgataacactcgctacttgtgagctttatcactaccaagagtgtgttagaggtacaacagtacttttaaaagaaccttgctcttctggaacatacgagggcaattcaccatnnnnnnnnnnnnnnnnnnnnnnnnnnnnnnnnnnnnnnnnnnnnnnnnnnnnnnnnnnnnnnnnnnnnnnnngcgtaaaacacgtnnnnnnnnnnnnnnnnnnnnnnnnnnnnnnnnnnnnnnnnnnnnnnnnnnnnnnnnnnnnnnnnnnnnnnnnnnnnnnnnnnnnnnnnnnnnnnnnnnnnnnnnnnnnnnnnnnnnnnnnnnnnnnnnnnnnnnnnnnnnnnnnnnnnnnnnnnnnnnnnnnnnnnnnnnnnngtgctttttagcctttctgctattccttgttttaattatgcttattatcttttggttctcacttgaactgcaagatcataatgaaacttgtcacgcctaaacgaacatgaaatttcttgttttcttaggaatcatcacaactgtagctgcatttcaccaagaatgtagtttacagtcatgtacttaacatcaaccatatgtagttgatgacccgtgtcctattcacttctattctaaatggtatattagagtaggagctataaaatcagcacctttaattgaattgtgcgtggatgaggctggttctaaatcacccattcagtgcatcgatatcggtaattatacagtttcctgtttaccttttacaattaattgccaggaacctaaattgggtagtcttgtagtgcgttgttcgttctatgaagactttttagagtatcatgacgttcgtgttgttttagatttcatctaaacgaacaaactaaatgtctctaaatggaccccaaaatcagcgaaatgcaccccgcattacgtttggtggaccctcagattcaactggcagtaaccagaatggagaacgcagtggggcgcgatcaaaacaacgtcggccccaaggtttacccaataatactgcgtcttggttcaccgctctcactcaacatggcaaggaagaccttaaattccctcgaggacaaggcgttccaattaacaccaatagcagtccagatgaccaaattggctactaccgaagagctaccagacgaattcgtggtggtgacggtaaaatgaaagatctcagtccaagatggtatttctactacctaggaactgggccagaagctggacttccctatggtgctaacaaagacggcatcatatgggttgcaactgagggagccttgaatacaccaaaagatcacattggcacccgcaatcctgctaacaatgctgcaatcgtgctacaacttcctcaaggaacaacattgccaaaaggcttctacgcagaagggagcagaggcggcagtcaagcctcttctcgttcctcatcacgtagtcgcaacagttcaagaaattcaactccaggcagcagtaaacgaacttctcctgctagaatggctggcaatggcggtgatgctgctcttgctttgctgctgcttgacagattgaaccagcttgagagcaaaatgtttggtaaaggccaacaacaacaaggccaaactgtcactaagaaatctgctgctgaggcttctaagaagcctcggcaaaaacgtactgccactaaagcatacaatgtaacacaagctttcggcagacgtggtccagaacaaacccaaggaaattttggggaccaggaactaatcagacaaggaactgattacaaacattggccgcaaattgcacaatttgcccccagcgcttcagcgttcttcggaatgtcgcgcattggcatggaagtcacaccttcgggaacgtggttgacctacacaggtgccatcaaattggatgacaaagatccaaatttcaaagatcaagtcattttgctgaataagcatattgacgcatacaaaacattcccaccaacagagcctaaaaaggacaaaaagaagaaggctgatgaaactcaagccttaccgcagagacagaagaaacagcaaactgtgactcttcttcctgctgcagatttggatgatttctccaaacaattgcaacaatccatgagcagtgctgactcaactcaggcctaaactcatgcagaccacacaaggcagatgggctatataaacgttttcgcttttccgtttacgatatatagtctactcttgtgcagaatgaattctcgtaactacatagcacaagtagatgtagttaactttaatctcacatagcaatctttaatcagtgtgtaacattagggaggacttgaaagagccaccacattttcaccgaggccacgcggagtacgatcgagtgtacagtgaacaatgctagggagagctgcctatatggaagagccctaatgtgtaaaattaattttagtagtgctatccccatgtgattttaatagc

SEQ ID NO: 291 - DNA, 29763 bp, Artificial Sequence
  SARS-CoV-2 variant
  misc_feature (7618)..(7914): n is a, c, g, or t
  misc_feature (19213)..(19507): n is a, c, g, or t
  misc_feature (21070)..(21070): n is a, c, g, or t
  misc_feature (27440)..(27736): n is a, c, g, or t
agatctgttctctaaacgaactttaaaatctgtgtggctgtcactcggctgcatgcttagtgcactcacgcagtataattaataactaattactgtcgttgacaggacacgagtaactcgtctatcttctgcaggctgcttacggtttcgtccgtgttgcagccgatcatcagcacatctaggttttgtccgggtgtgaccgaaaggtaagatggagagccttgtccctggtttcaacgagaaaacacacgtccaactcagtttgcctgttttacaggttcgcgacgtgctcgtacgtggctttggagactccgtggaggaggtcttatcagaggcacgtcaacatcttaaagatggcacttgtggcttagtagaagttgaaaaaggcgttttgcctcaacttgaacagccctatgtgttcatcaaacgttcggatgctcgaactgcacctcatggtcatgttatggttgagctggtagcagaactcgaaggcattcagtacggtcgtagtggtgagacacttggtgtccttgtccctcatgtgggcgaaataccagtggcttaccgcaaggttcttcttcgtaagaacggtaataaaggagctggtggccatagttacggcgccgatctaaagtcatttgacttaggcgacgagcttggcactgatccttatgaagattttcaagaaaactggaacactaaacatagcagtggtgttacccgtgaactcatgcgtgagcttaacggaggggcatacactcgctatgtcgataacaacttctgtggccctgatggctaccctcttgagtgcattaaagaccttctagcacgtgctggtaaagcttcatgcactttgtctgaacaactggactttattgacactaagaggggtgtatactgctgccgtgaacatgagcatgaaattgcttggtacacggaacgttctgaaaagagctatgaattgcagacaccttttgaaattaaattggcaaagaaatttgacaccttcaatggggaatgtccaaattttgtatttcccttaaattccataatcaagactattcaaccaagggttgaaaagaaaaagcttgatggctttatgggtagaattcgatctgtctatccagttgcgtcaccaaatgaatgcaaccaaatgtgcctttcaactctcatgaagtgtgatcattgtggtgaaacttcatggcagacgggcgattttgttaaagccacttgcgaattttgtggcactgagaatttgactaaagaaggtgccactacttgtggttacttaccccaaaatgctgttgttaaaatttattgtccagcatgtcacaattcagaagtaggacctgagcatagtcttgccgaataccataatgaatctggcttgaaaaccattcttcgtaagggtggtcgcactattgcctttggaggctgtgtgttctcttatgttggttgccataacaagtgtgcctattgggttccacgtgctagcgctaacataggttgtaaccatacaggtgttgttggagaaggttccgaaggtcttaatgacaaccttcttgaaatactccaaaaagagaaagtcaacatcaatattgttggtgactttaaacttaatgaagagatcgccattattttggcatctttttctgcttccacaagtgcttttgtggaaactgtgaaaggtttggattataaagcattcaaacaaattgttgaatcctgtggtaattttaaagttacaaaaggaaaagctaaaaaaggtgcctggaatattggtgaacagaaatcaatactgagtcctctttatgcatttgcatcagaggctgctcgtgttgtacgatcaattttctcccgcactcttgaaactgctcaaaattctgtgcgtgttttacagaaggccgctataacaatactagatggaatttcacagtattcactgagactcattgatgctatgatgttcacatctgatttggctactaacaatctagttgtaatggcctacattacaggtggtgttgttcagttgacttcgcagtggctaactaacatctttggcactgtttatgaaaaactcaaacccgtccttgattggcttgaagagaagtttaaggaaggtgtagagtttcttagagacggttgggaaattgttaaatttatctcaacctgtgcttgtgaaattgtcggtggacaaattgtcacctgtgcaaaggaaattaaggagagtgttcagacattctttaagcttgtaaataaatttttggctttgtgtgctgactctatcattattggtggagctaaacttaaagccttgaatttaggtgaaacatttgtcacgcactcaaagggattgtacagaaagtgtgttaaatccagagaagaaactggcctactcatgcctctaaaagccccaaaagaaattatcttcttagagggagaaacacttcccacagaagtgttaacagaggaagttgtcttgaaaactggtgatttacaaccattagaacaacctactagtgaagctgttgaagctccattggttggtacaccagtttgtattaacgggcttatgttgctcgaaatcaaagacacagaaaagtactgtgcccttgcacctaatatgatggtaacaaacaataccttcacactcaaaggcggtgcaccaacaaaggttacttttggtgatgacactgtgatagaagtgcaaggttacaagagtgtgaatatcacttttgaacttgatgaaaggattgataaagtacttaatgagaagtgctctgcctatacagttgaactcggtacagaagtaaatgagttcgcctgtgttgtggcagatgctgtcataaaaactttgcaaccagtatctgaattacttacaccactgggcattgatttagatgagtggagtatggctacatactacttatttgatgagtctggtgagtttaaattggcttcacatatgtattgttctttttaccctccagatgaggatgaagaagaaggtgattgtgaagaagaagagtttgagccatcaactcaatatgagtatggtactgaagatgattaccaaggtaaacctttggaatttggtgccacttctgctgctcttcaacctgaagaagagcaagaagaagattggttagatgatgatagtcaacaaactgttggtcaacaagacggcagtgaggacaatcagacaactattattcaaacaattgttgaggttcaacctcaattagagatggaacttacaccagttgttcagactattgaagtgaatagttttagtggttatttaaaacttactgacaatgtatacattaaaaatgcagacattgtggaagaagctaaaaaggtaaaaccaacagtggttgttaatgcagccaatgtttaccttaaacatggaggaggtgttgcaggagccttaaataaggctactaacaatgccatgcaagttgaatctgatgattacatagctactaatggaccacttaaagtgggtggtagttgtgttttaagcggacacaatcttgctaaacactgtcttcatgttgtcggcccaaatgttaacaaaggtgaagacattcaacttcttaagagtgcttatgaaaattttaatcagcacgaagttctacttgcaccattattatcagctggtatttttggtgctgaccctatacattctttaagagtttgtgtagatactgttcgcacaaatgtctacttagctgtctttgataaaaatctctatgacaaacttgtttcaagctttttggaaatgaagagtgaaaagcaagttgaacaaaagatcgctgagattcctaaagaggaagttaagccatttataactgaaagtaaaccttcagttgaacagagaaaacaagatgataagaaaatcaaagcttgtgttgaagaagttacaacaactctggaagaaactaagttcctcacagaaaacttgttactttatattgacattaatggcaatcttcatccagattctgccactcttgttagtgacattgacatcactttcttaaagaaagatgctccatatatagtgggtgatgttgttcaagagggtgttttaactgctgtggttatacctactaaaaaggctggtggcactactgaaatgctagcgaaagctttgagaaaagtgccaacagacaattatataaccacttacccgggtcagggtttaaatggttacactgtagaggaggcaaagacagtgcttaaaaagtgtaaaagtgccttttacattctaccatctattatctctaatgagaagcaagaaattcttggaactgtttcttggaatttgcgagaaatgcttgcacatgcagaagaaacacgcaaattaatgcctgtctgtgtggaaactaaagccatagtttcaactatacagcgtaaatataagggtattaaaatacaagagggtgtggttgattatggtgctagattttacttttacaccagtaaaacaactgtagcgtcacttatcaacacacttaacgatctaaatgaaactcttgttacaatgccacttggctatgtaacacatggcttaaatttggaagaagctgctcggtatatgagatctctcaaagtgccagctacagtttctgtttcttcacctgatgctgttacagcgtataatggttatcttacttcttcttctaaaacacctgaagaacattttattgaaaccatctcacttgctggttcctataaagattggtcctattctggacaatctacacaactaggtatagaatttcttaagagaggtgataaaagtgtatattacactagtaatcctaccacattccacctagatggtgaagttatcacctttgacaatcttaagacacttctttctttgagagaagtgaggactattaaggtgtttacaacagtagacaacattaacctccacacgcaagttgtggacatgtcaatgacatatggacaacagtttggtccaacttatttggatggagctgatgttactaaaataaaacctcataattcacatgaaggtaaaacattttatgttttacctaatgatgacactctacgtgttgaggcttttgagtactaccacacaactgatcctagttttctgggtaggtacatgtcagcattaaatcacactaaaaagtggaaatacccacaagttaatggtttaacttctattaaatgggcagataacaactgttatcttgccactgcattgttaacactccaacaaatagagttgaagtttaatccacctgctctacaagatgcttattacagagcaagggctggtgaagctgataacttttgtgcacttatcttagcctactgtaataagacagtaggtgagttaggtgatgttagagaaacaatgagttacttgtttcaacatgccaatttagattcttgcaaaagagtcttgaacgtggtgtgtaaaacttgtggacaacagcagacaacccttaagggtgtagaagctgttatgtacatgggcacactttcttatgaacaatttaagaaaggtgttcagataccttgtacgtgtggtaaacaagctacaaaatatctagtacaacaggagtcaccttttgttatgatgtcagcaccacctgctcagtatgaacttaagcatggtacatttacttgtgctagtgagtacactggtaattaccagtgtggtcactataaacatataacttctaaagaaactttgtattgcatagacggtgctttacttacaaagtcctcagaatacaaaggtcctattacggatgttttctacaaagaaaacagttacacaacaaccataaaaccagttacttataaattggatggtgttgtttgtacagaaattgaccctaagttggacaattattataagaaagacaattcttattttacagagcaaccaattgatcttgtaccaaaccaaccatatccaaacgcaagcttcgataattttaagtttgtatgtgataatatcaaatttgctgatgatttaaaccagttaactggttataagaaacctgcttcaagagagcttaaagttacatttttccctgacttaaatggtgatgtggtggctattgattataaacactacacaccctcttttaagaaaggagctaaattgttacataaacctattgtttggcatgttaacaatgcaactaataaagccacgtataaaccaaatacctggtgtatacgttgtctttggagcacaaaaccagttgaaacatcaaattcgtttgatgtactgaagtcagaggacgcgcagggaatggataatcttgcctgcgaagatctaaaaccagtctctgaagaagtagtggaaaatcctaccatacagaaagacgttcttgagtgtaatgtgaaaactaccgaagttgtaggagacattatacttaaaccagcaaataatagtttaaaaattacagaagaggttggccacacagatctaatggctgcttatgtagacaattctagtcttactattaagaaacctaatgaattatctagagtattaggtttgaaaacccttgctactcatggtttagctgctgttaatagtgtcccttgggatactatagctaattatgctaagccttttcttaacaaagttgttagtacaactactaacatagttacacggtgtttaaaccgtgtttgtactaattatatgccttatttctttactttattgctacaattgtgtacttttactagaagtacaaattctagaattaaagcatctatgccgactactatagcaaagaatactgttaagagtgtcggtaaattttgtctagaggcttcatttaattatttgaagtcacctaatttttctaaactgataaatattacaatttggtttttactattaagtgtttgcctaggttctttaatctactcaaccgctgctttaggtgttttaatgtctaatttaggcatgccttcttactgtactggttacagagaaggctatttgaactctactaatgtcactattgcaacctactgtactggttctataccttgtagtgtttgtcttagtggtttagattctttagacacctatccttctttagaaactatacaaattaccatttcatcttttaaatgggatttaactgcttttggcttagttgcagagtggtttttggcatatattcttttcactaggtttttctatgtacttggattggctgcaatcatgcaattgtttttcagctattttgcagtacattttattagtaattcttggcttatgtggttaataattaatcttgtacaaatggccccgatttcagctatggttagaatgtacatcttctttgcatcattttattatgtatggaaaagttatgtgcatgttgtagacggttgtaattcatcaacttgtatgatgtgttacaaacgtaatagagcaacaagagtcgaatgtacaactattgttaatggtgttagaaggtccttttatgtctatgctaatggaggtaaaggcttttgcaaactacacaattggaattgtgttaattgtgatacattctgtgctggtagtacatttattagtgatgaagtnnnnnnnnnnnnnnnnnnnnnnnnnnnnnnnnnnnnnnnnnnnnnnnnnnnnnnnnnnnnnnnnnnnnnnnnnnnnnnnnnnnnnnnnnnnnnnnnnnnnnnnnnnnnnnnnnnnnnnnnnnnnnnnnnnnnnnnnnnnnnnnnnnnnnnnnnnnnnnnnnnnnnnnnnnnnnnnnnnnnnnnnnnnnnnnnnnnnnnnnnnnnnnnnnnnnnnnnnnnnnnnnnnnnnnnnnnnnnnnnnnnnnnnnnnnnnnnnnnnnnnnnnnnnnnnnnnnnnnnnnnnnnnnnnnnnnnnnntatactgttactagatcaggcattagtgtctgatgttggtgatagtgcggaagttgcagttaaaatgtttgatgcttacgttaatacgttttcatcaacttttaacgtaccaatggaaaaactcaaaacactagttgcaactgcagaagctgaacttgcaaagaatgtgtccttagacaatgtcttatctacttttatttcagcagctcggcaagggtttgttgattcagatgtagaaactaaagatgttgttgaatgtcttaaattgtcacatcaatctgacatagaagttactggcgatagttgtaataactatatgctcacctataacaaagttgaaaacatgacaccccgtgaccttggtgcttgtattgactgtagtgcgcgtcatattaatgcgcaggtagcaaaaagtcacaacattgctttgatatggaacgttaaagatttcatgtcattgtctgaacaactacgaaaacaaatacgtagtgctgctaaaaagaataacttaccttttaagttgacatgtgcaactactagacaagttgttaatgttgtaacaacaaagatagcacttaagggtggtaaaattgttaataattggttgaagcagttaattaaagttacacttgtgttcctttttgttgctgctattttctatttaataacacctgttcatgtcatgtctaaacatactgacttttcaagtgaaatcataggatacaaggctattgatggtggtgtcactcgtgacatagcatctacagatacttgttttgctaacaaacatgctgattttgacacatggtttagccagcgtggtggtagttatactaatgacaaagcttgcccattgattgctgcagtcataacaagagaagtgggttttgtcgtgcctggtttgcctggcacgatattacgcacaactaatggtgactttttgcatttcttacctagagtttttagtgcagttggtaacatctgttacacaccatcaaaacttatagagtacactgactttgcaacatcagcttgtgttttggctgctgaatgtacaatttttaaagatgcttctggtaagccagtaccatattgttatgataccaatgtactagaaggttctgttgcttatgaaagtttacgccctgacacacgttatgtgctcatggatggctctattattcaatttcctaacacctaccttgaaggttctgttagagtggtaacaacttttgattctgagtactgtaggcacggcacttgtgaaagatcagaagctggtgtttgtgtatctactagtggtagatgggtacttaacaatgattattacagatctttaccaggagttttctgtggtgtagatgctgtaaatttacttactaatatgtttacaccactaattcaacctattggtgctttggacatatcagcatctatagtagctggtggtattgtagctatcgtagtaacatgccttgcctactattttatgaggtttagaagagcttttggtgaatacagtcatgtagttgcctttaatactttactattccttatgtcattcactgtactctgtttaacaccagtttactcattcttacctggtgtttattctgttatttacttgtacttgacattttatcttactaatgatgtttcttttttagcacatattcagtggatggttatgttcacacctttagtacctttctggataacaattgcttatatcatttgtatttccacaaagcatttctattggttctttagtaattacctaaagagacgtgtagtctttaatggtgtttcctttagtacttttgaagaagctgcgctgtgcacctttttgttaaataaagaaatgtatctaaagttgcgtagtgatgtgctattacctcttacgcaatataatagatacttagctctttataataagtacaagtattttagtggagcaatggatacaactagctacagagaagctgcttgttgtcatctcgcaaaggctctcaatgacttcagtaactcaggttctgatgttctttaccaaccaccacaaacctctatcacctcagctgttttgcagagtggttttagaaaaatggcattcccatctggtaaagttgagggttgtatggtacaagtaacttgtggtacaactacacttaacggtctttggcttgatgacgtagtttactgtccaagacatgtgatctgcacctctgaagacatgcttaaccctaattatgaagatttactcattcgtaagtctaatcataatttcttggtacaggctggtaatgttcaactcagggttattggacattctatgcaaaattgtgtacttaagcttaaggttgatacagccaatcctaagacacctaagtataagtttgttcgcattcaaccaggacagactttttcagtgttagcttgttacaatggttcaccatctggtgtttaccaatgtgctatgaggcccaatttcactattaagggttcattccttaatggttcatgtggtagtgttggttttaacatagattatgactgtgtctctttttgttacatgcaccatatggaattaccaactggagttcatgctggcacagacttagaaggtaacttttatggaccttttgttgacaggcaaacagcacaagcagctggtacggacacaactattacagttaatgttttagcttggttgtacgctgctgttataaatggagacaggtggtttctcaatcgatttaccacaactcttaatgactttaaccttgtggctatgaagtacaattatgaacctctaacacaagaccatgttgacatactaggacctctttctgctcaaactggaattgccgttttagatatgtgtgcttcattaaaagaattactgcaaaatggtatgaatggacgtaccatattgggtagtgctttattagaagatgaatttacaccttttgatgttgttagacaatgctcaggtgttactttccaaagtgcagtgaaaagaacaatcaagggtacacaccactggttgttactcacaattttgacttcacttttagttttagtccagagtactcaatggtctttgttcttttttttgtatgaaaatgcctttttaccttttgctatgggtattattgctatgtctgcttttgcaatgatgtttgtcaaacataagcatgcatttctctgtttgtttttgttaccttctcttgccactgtagcttattttaatatggtctatatgcctgctagttgggtgatgcgtattatgacatggttggatatggttgatactagtttgaagctaaaagactgtgttatgtatgcatcagctgtagtgttactaatccttatgacagcaagaactgtgtatgatgatggtgctaggagagtgtggacacttatgaatgtcttgacactcgtttataaagtttattatggtaatgctttagatcaagccatttccatgtgggctcttataatctctgttacttctaactactcaggtgtagttacaactgtcatgtttttggccagaggtattgtttttatgtgtgttgagtattgccctattttcttcataactggtaatacacttcagtgtataatgctagtttattgtttcttaggctatttttgtacttgttactttggcctcttttgtttactcaaccgctactttagactgactcttggtgtttatgattacttagtttctacacaggagtttagatatatgaattcacagggactactcccacccaagaatagcatagatgccttcaaactcaacattaaattgttgggtgttggtggcaaaccttgtatcaaagtagccactgtacagtctaaaatgtcagatgtaaagtgcacatcagtagtcttactctcagttttgcaacaactcagagtagaatcatcatctaaattgtgggctcaatgtgtccagttacacaatgacattctcttagctaaagatactactgaagcctttgaaaaaatggtttcactactttctgttttgctttccatgcagggtgctgtagacataaacaagctttgtgaagaaatgctggacaacagggcaaccttacaagctatagcctcagagtttagttcccttccatcatatgcagcttttgctactgctcaagaagcttatgagcaggctgttgctaatggtgattctgaagttgttcttaaaaagttgaagaagtctttgaatgtggctaaatctgaatttgaccgtgatgcagccatgcaacgtaagttggaaaagatggctgatcaagctatgacccaaatgtataaacaggctagatctgaggacaagagggcaaaagttactagtgctatgcagacaatgcttttcactatgcttagaaagttggataatgatgcactcaacaacattatcaacaatgcaagagatggttgtgttcccttgaacataatacctcttacaacagcagccaaactaatggttgtcataccagactataacacatataaaaatacgtgtgatggtacaacatttacttatgcatcagcattgtgggaaatccaacaggttgtagatgcagatagtaaaattgttcaacttagtgaaattagtatggacaattcacctaatttagcatggcctcttattgtaacagctttaagggccaattctgctgtcaaattacagaataatgagcttagtcctgttgcactacgacagatgtcttgtgctgccggtactacacaaactgcttgcactgatgacaatgcgttagcttactacaacacaacaaagggaggtaggtttgtacttgcactgttatccgatttacaggatttgaaatgggctagattccctaagagtgatggaactggtactatctatacagaactggaaccaccttgtaggtttgttacagacacacctaaaggtcctaaagtgaagtatttatactttattaaaggattaaacaacctaaatagaggtatggtacttggtagtttagctgccacagtacgtctacaagctggtaatgcaacagaagtgcctgccaattcaactgtattatctttctgtgcttttgctgtagatgctgctaaagcttacaaagattatctagctagtgggggacaaccaatcactaattgtgttaagatgttgtgtacacacactggtactggtcaggcaataacagttacaccggaagccaatatggatcaagaatcctttggtggtgcatcgtgttgtctgtactgccgttgccacatagatcatccaaatcctaaaggattttgtgacttaaaaggtaagtatgtacaaatacctacaacttgtgctaatgaccctgtgggttttacacttaaaaacacagtctgtaccgtctgcggtatgtggaaaggttatggctgtagttgtgatcaactccgcgaacccatgcttcagtcagctgatgcacaatcgtttttaaacgggtttgcggtgtaagtgcagcccgtcttacaccgtgcggcacaggcactagtactgatgtcgtatacagggcttttgacatctacaatgataaagtagctggttttgctaaattcctaaaaactaattgttgtcgcttccaagaaaaggacgaagatgacaatttaattgattcttactttgtagttaagagacacactttctctaactaccaacatgaagaaacaatttataatttacttaaggattgtccagctgttgctaaacatgacttctttaagtttagaatagacggtgacatggtaccacatatatcacgtcaacgtcttactaaatacacaatggcagacctcgtctatgctttaaggcattttgatgaaggtaattgtgacacattaaaagaaatacttgtcacatacaattgttgtgatgatgattatttcaataaaaaggactggtatgattttgtagaaaacccagatatattacgcgtatacgccaacttaggtgaacgtgtacgccaagctttgttaaaaacagtacaattctgtgatgccatgcgaaatgctggtattgttggtgtactgacattagataatcaagatctcaatggtaactggtatgatttcggtgatttcatacaaaccacgccaggtagtggagttcctgttgtagattcttattattcattgttaatgcctatattaaccttgaccagggctttaactgcagagtcacatgttgacactgacttaacaaagccttacattaagtgggatttgttaaaatatgacttcacggaagagaggttaaaactctttgaccgttattttaaatattgggatcagacataccacccaaattgtgttaactgtttggatgacagatgcattctgcattgtgcaaactttaatgttttattctctacagtgttcccacttacaagttttggaccactagtgagaaaaatatttgttgatggtgttccatttgtagtttcaactggataccacttcagagagctaggtgttgtacataatcaggatgtaaacttacatagctctagacttagttttaaggaattacttgtgtatgctgctgaccctgctatgcacgctgcttctggtaatctattactagataaacgcactacgtgcttttcagtagctgcacttactaacaatgttgcttttcaaactgtcaaacctggtaattttaacaaagacttctatgactttgctgtgtctaagggtttctttaaggaaggaagttctgttgaattaaaacacttcttctttgctcaggatggtaatgctgctatcagcgattatgactactatcgttataatctaccaacaatgtgtgatatcagacaactactatttgtagttgaagttgttgataagtactttgattgttacgatggtggctgtattaatgctaaccaagtcatcgtcaacaacctagacaaatcagctggttttccatttaataaatggggtaaggctagactttattatgattcaatgagttatgaggatcaagatgcacttttcgcatatacaaaacgtaatgtcatccctactataactcaaatgaatcttaagtatgccattagtgcaaagaacagagctcgcaccgtagctggtgtctctatctgtagtactatgaccaatagacagtttcatcaaaaattattgaaatcaatagccgccactagaggagctactgtagtaattggaacaagcaaattctatggtggttggcacaacatgttaaaaactgtttatagtgatgtagaaaaccctcatcttatgggttgggattatcctaaatgtgatagagccatgcctaacatgcttagaattatggcctcacttgttcttgctcgcaaacatacaacgtgttgtagcttgtcacaccgtttctatagattagctaatgagtgtgctcaagtattgagtgaaatggtcatgtgtggcggttcactatatgttaaaccaggtggaacctcatcaggagatgccacaactgcttatgctaatagtgtttttaacatttgtcaagctgtcacggccaatgttaatgcacttttatctactgatggtaacaaaattgccgataagtatgtccgcaatttacaacacagactttatgagtgtctctatagaaatagagatgttgacacagactttgtgaatgagttttacgcatatttgcgtaaacatttctcaatgatgatactctctgacgatgctgttgtgtgtttcaatagcacttatgcatctcaaggtctagtggctagcataaagaactttaagtcagttctttattatcaaaacaatgtttttatgtctgaagcaaaatgttggactgagactgaccttactaaaggacctcatgaattttgctctcaacatacaatgctagttaaacagggtgatgattatgtgtaccttccttacccagatccatcaagaatcctaggggccggctgttttgtagatgatatcgtaaaaacagatggtacacttatgattgaacggttcgtgtctttagctatagatgcttacccacttactaaacatcctaatcaggagtatgctgatgtctttcatttgtacttacaatacataagaaagctacatgatgagttaacaggacacatgttagacatgtattctgttatgcttactaatgataacacctcaaggtattgggaacctgagttttatgaggctatgtacacaccgcatacagtcttacaggctgttggggcttgtgttctttgcaattcacagacttcattaagatgtggtgcttgcatacgtagaccattcttatgttgtaaatgctgttacgaccatgtcatatcaacatcacataaattagtcttgtctgttaatccgtatgtttgcaatgctccaggttgtgatgtcacagatgtgactcaactttacttaggaggtatgagctattattgtaaatcacataaaccacccattagttttccattgtgtgctaatggacaagtttttggtttatataaaaatacatgtgttggtagcgataatgttactgactttaatgcaattgcaacatgtgactggacaaatgctggtgattacattttagctaacacctgtactgaaagactcaagctttttgcagcagaaacgctcaaagctactgaggagacatttaaactgtcttatggtattgctactgtacgtgaagtgctgtctgacagagaattacatctttcatgggaagttggtaaacctagaccaccacttaaccgaaattatgtctttactggttatcgtgtaactaaaaacagtaaagtacaaataggagagtacacctttgaaaaaggtgactatggtgatgctgttgtttaccgaggtacaacaacttacaaattaaatgttggtgattattttgtgctgacatcacatacagtaatgccattaagtgcacctacactagtgccacaagagcactatgttagaattactggcttatacccaacactcaatatctcagatgagttttctagcaatgttgcaaattatcaaaaggttggtatgcaaaagtattctacactccagggaccacctggtactggtaagagtcattttgctattggcctagctctctactacccttctgctcgcatagtgtatacagcttgctctcatgccgctgttgatgcactatgtgagaaggcattaaaatatttgcctatagataaatgtagtagaattatacctgcacgtgctcgtgtagagtgttttgataaattcaaagtgaattcaacattagaacagtatgtcttttgtactgtaaatgcattgcctgagacgacagcagatatagttgtctttgatgaaatttcaatggccacaaattatgatttgagtgttgtcaatgccagattacgtgctaagcactatgtgtacattggcgaccctgctcaattacctgcaccacgcacattgctaactaagggcacactagaaccagaatatttcaattcagtgtgtagacttatgaaaactataggtccagacatgttcctcggaacttgtcggcgttgtcctgctgaaattgttgacactgtgagtgctttggtttatgataataagcttaaagcacataaagacaaatcagctcaatgctttaaaatgttttataagggtgttatcacgcatgatgtttcatctgcaattaacaggccacaaataggcgtggtaagagaattccttacacgtaaccctgcttggagaaaagctgtctttatttcaccttataattcacagaatgctgtagcctcaaagattttgggactaccaactcaaactgttgattcatcacagggctcagaatatgactatgtcatattcactcaaaccactgaaacagctcactcttgtaatgtaaacagatttaatgttgctattaccagagcaaaagtaggcatactttgcataatgtctgatagagacctttatgacaagttgcaatttacaagtcttgaaattccacgtaggaatgtggcaactttacaagctgaaaatgtaacaggactctttaaagattgtagtaaggtaatcactgggttacatcctacacaggcacctacacacctcagtgttgacactaaattcaaaactgaaggtttatgtgttgacatacctggcatacctaaggacatgacctatagaagactcatctctatgatgggttttaaaatgaattatcaagttaatggttaccctaacatgtttatcacccgcgaagaagctataagacatgtacgtgcatggattggcttcgatgtcgaggggtgtcatgctactagagaagctgttggtaccaatttacctttacagctaggtttttctacaggtgttaacctagttgctgtacctacaggttatgttgatacacctaataatacagatttttccagagttagtgctaaaccaccgcctggagatcaatttaaacacctcataccacttatgtacaaaggacttccttggaatgtagtgcgtataaagattgtacaaatgttaagtgacacacttaaaaatctctctgacagagtcgtatttgtcttatgggcacatggctttgagttgacatctatgaagtattttgtgaaaataggacctgagcgcacctgttgtctatgtgatagacgtgccacatgcttttccactgcttcagacacttatgcctgttggcatcattctattggatttgattacgtctataatccgtttatgattgatgttcaacaatggggttttacaggtaacctacaaagcaaccatgatctgtattgtcaagtccatggtaatgcacatgtagctagttgtgatgcaatcatgactaggtgtctagctgtccacgagtgctttgttaagcgtgttgactggactattgaatatcctataattggtgatgaactgaagattaatgcggcttgtagaaaggttcaacacatggttgttaaagctgcattattagcagacaaattcccagttcttcacgacattggtaaccctaaagctattaagtgtgtacctcaagctgatgtagaatggaagttctatgatgcacagccttgtagtgacaaagcttataaaatagaagaattattctattcttatgccacacattctgacaaattcacagatggtgtatgcctattttggaattgcaatgtcgatagatatcctgctaattccattgtttgtagatttgacactagagtgctatctaaccttaacttgcctnnnnnnnnnnnnnnnnnnnnnnnnnnnnnnnnnnnnnnnnnnnnnnnnnnnnnnnnnnnnnnnnnnnnnnnnnnnnnnnnnnnnnnnnnnnnnnnnnnnnnnnnnnnnnnnnnnnnnnnnnnnnnnnnnnnnnnnnnnnnnnnnnnnnnnnnnnnnnnnnnnnnnnnnnnnnnnnnnnnnnnnnnnnnnnnnnnnnnnnnnnnnnnnnnnnnnnnnnnnnnnnnnnnnnnnnnnnnnnnnnnnnnnnnnnnnnnnnnnnnnnnnnnnnnnnnnnnnnnnnnnnnnnnnnnnnnnnacaaacaatttgatacttataacctctggaacacttttacaagacttcagagtttagaaaatgtggcttttaatgttgtaaataagggacactttgatggacaacagggtgaagtaccagtttctatcattaataacactgtttacacaaaagttgatggtgttgatgtagaattgtttgaaaataaaacaacattacctgttaatgtagcatttgagctttgggctaagcgcaacattaaaccagtaccagaggtgaaaatactcaataatttgggtgtggacattgctgctaatactgtgatctgggactacaaaagagatgctccagcacatatatctactattggtgtttgttctatgactgacatagccaagaaaccaactgaaacgatttgtgcaccactcactgtcttttttgatggtagagttgatggtcaagtagacttatttagaaatgcccgtaatggtgttcttattacagaaggtagtgttaaaggtttacaaccatctgtaggtcccaaacaagctagtcttaatggagtcacattaattggagaagccgtaaaaacacagttcaattattataagaaagttgatggtgttgtccaacaattacctgaaacttactttactcagagtagaaatttacaagaatttaaacccaggagtcaaatggaaattgatttcttagaattagctatggatgaattcattgaacggtataaattagaaggctatgccttcgaacatatcgtttatggagattttagtcatagtcagttaggtggtttacatctactgattggactagctaaacgttttaaggaatcaccttttgaattagaagattttattcctatggacagtacagttaaaaactatttcataacagatgcgcaaacaggttcatctaagtgtgtgtgttctgttattgatttattacttgatgattttgttgaaataataaaatcccaagatttatctgtagtttctaaggttgtcaaagtgactattgactatacagaaatttcatttatgctttggtgtaaagatggccatgtagaaacattttacccaaaattacaatctagtcaagcgtggcaaccgggtgttgctatgcctaatctttacaaaatgcaaagaatgctattagaaaattgtgaccttcaaaattatggtgatagtgcaacattacctaaaggcataatgatgaatgtcgcaaaatatactcaactgtgtcaatatttaaacacattaacattagctgtaccctataatatgagagttatacattttggtgctggttctgataaaggagttgcaccaggtacagctgttttaagacagtggttgcctacgggtacgctgcttgtcgattcagatcttaatgactttgtctctgatgcagattcaactttgattggtgattgtgcaactgtacatacagctaataaatgggatctcattattagtgatatgtacgaccctaagactaaaaatgttacaaaagaaaatgactctaaagagggttttttcacttacatttgtgggtttatacaanaaaagctagctcttggaggttccgtggctataaagataacagaacattcttggaatgctgatctttataagctcatgggacacttcgcatggtggacagcctttgttactaatgtgaatgcgtcatcatctgaagcatttttaattggatgtaattatcttggcaaaccacgcgaacaaatagatggttatgtcatgcatgcaaattacatattttggaggaatacaaatccaattcagttgtcttcctattctttatttgacatgagtaaatttccccttaaattaaggggtactgctgttatgtctttaaaagaaggtcaaatcaatgatatgattttatctcttcttagtaaaggtagacttataattagagaaaacaacagagttgttatttctagtgatgttcttgttaacaactaaacgaacaatgtttgtttttcttgttttattgccactagtctctagtcagtgtgttaatcttacaaccagaactcaattaccccctgcatacactaattctttcacacgtggtgtttattaccctgacaaagttttcagatcctcagttttacattcaactcaggacttgttcttacctttcttttccaatgttacttggttccatgctatctctgggaccaatggtactaagaggtttgataaccctgtcctaccatttaatgatggtgtttattttgcttccactgagaagtctaacataataagaggctggatttttggtactactttagattcgaagacccagtccctacttattgttaataacgctactaatgttgttattaaagtctgtgaatttcaattttgtaatgatccatttttgggtgtttaccacaaaaacaacaaaagttggatggaaagtgagttcagagtttattctagtgcgaataattgcacttttgaatatgtctctcagccttttcttatggaccttgaaggaaaacagggtaatttcaaaaatcttagggaatttgtgtttaagaatattgatggttattttaaaatatattctaagcacacgcctattaatttagtgcgtgatctccctcagggtttttcggctttagaaccattggtagatttgccaataggtattaacatcactaggtttcaaactttacttgctttacatagaagttatttgactcctggtgattcttcttcaggttggacagctggtgctgcagcttattatgtgggttatcttcaacctaggacttttctattaaaatataatgaaaatggaaccattacagatgctgtagactgtgcacttgaccctctctcagaaacaaagtgtacgttgaaatccttcactgtagaaaaaggaatctatcaaacttctaactttagagtccaaccaacagaatctattgttagatttcctaatattacaaacttgtgcccttttggtgaagtttttaacgccaccagatttgcatctgtttatgcttggaacaggaagagaatcagcaactgtgttgctgattattctgtcctatataattccgcatcattttccacttttaagtgttatggagtgtctcctactaaattaaatgatctctgctttactaatgtctatgcagattcatttgtaattagaggtgatgaagtcagacaaatcgctccagggcaaactggaaagattgctgattataattataaattaccagatgattttacaggctgcgttatagcttggaattctaacaatcttgattctaaggttggtggtaattataattacctgtatagattgtttaggaagtctaatctcaaaccttttgagagagatatttcaactgaaatctatcaggccggtagcacaccttgtaatggtgttgaaggttttaattgttactttcctttacaatcatatggtttccaacccacttatggtgttggttaccaaccatacagagtagtagtactttcttttgaacttctacatgcaccagcaactgtttgtggacctaaaaagtctactaatttggttaaaaacaaatgtgtcaatttcaacttcaatggtttaacaggcacaggtgttcttactgagtctaacaaaaagtttctgcctttccaacaatttggcagagacattgatgacactactgatgctgtccgtgatccacagacacttgagattcttgacattacaccatgttcttttggtggtgtcagtgttataacaccaggaacaaatacttctaaccaggttgctgttctttatcagggtgttaactgcacagaagtccctgttgctattcatgcagatcaacttactcctacttggcgtgtttattctacaggttctaatgtttttcaaacacgtgcaggctgtttaataggggctgaacatgtcaacaactcatatgagtgtgacatacccattggtgcaggtatatgcgctagttatcagactcagactaattctcatcggcgggcacgtagtgtagctagtcaatccatcattgcctacactatgtcacttggtgcagaaaattcagttgcttactctaataactctattgccatacccataaattttactattagtgttaccacagaaattctaccagtgtctatgaccaagacatcagtagattgtacaatgtacatttgtggtgattcaactgaatgcagcaatcttttgttgcaatatggcagtttttgtacacaattaaaccgtgctttaactggaatagctgttgaacaagacaaaaacacccaagaagtttttgcacaagtcaaacaaatttacaaaacaccaccaattaaagattttggtggttttaatttttcacaaatattaccagatccatcaaaaccaagcaagaggtcatttattgaagatctacttttcaacaaagtgacacttgcagatgctggcttcatcaaacaatatggtgattgccttggtgatattgctgctagagacctcatttgtgcacaaaagtttaacggccttactgttttgccacctttgctcacagatgaaatgattgctcaatacacttctgcactgttagcgggtacaatcacttctggttggacctttggtgcaggtgctgcattacaaataccatttgctatgcaaatggcttataggtttaatggtattggagttacacagaatgttctctatgagaaccaaaaattgattgccaaccaatttaatagtgctattggcaaaattcaagactcactttcttccacagcaagtgcacttggaaaacttcaagatgtggtcaaccaaaatgcacaagctttaaacacgcttgttaaacaacttagctccaattttggtgcaatttcaagtgttttaaatgatatccttgcacgtcttgacaaagttgaggctgaagtgcaaattgataggttgatcacaggcagacttcaaagtttgcagacatatgtgactcaacaattaattagagctgcagaaatcagagcttctgctaatcttgctgctactaaaatgtcagagtgtgtacttggacaatcaaaaagagttgatttttgtggaaagggctatcatcttatgtccttccctcagtcagcacctcatggtgtagtcttcttgcatgtgacttatgtccctgcacaagaaaagaacttcacaactgctcctgccatttgtcatgatggaaaagcacactttcctcgtgaaggtgtctttgtttcaaatggcacacactggtttgtaacacaaaggaatttttatgaaccacaaatcattactacacacaacacatttgtgtctggtaactgtgatgttgtaataggaattgtcaacaacacagtttatgatcctttgcaacctgaattagactcattcaaggaggagttagataaatattttaagaatcatacatcaccagatgttgatttaggtgacatctctggcattaatgcttcagttgtaaacattcaaaaagaaattgaccgcctcaatgaggttgccaagaatttaaatgaatctctcatcgatctccaagaacttggaaagtatgagcagtatataaaatggccatggtacatttggctaggttttatagctggcttgattgccatagtaatggtgacaattatgctttgctgtatgaccagttgctgtagttgtctcaagggctgttgttcttgtggatcctgctgcaaatttgatgaagacgactctgagccagtgctcaaaggagtcaaattacattacacataaacgaacttatggatttgtttatgagaatcttcacaattggaactgtaactttgaagcaaggtgaaatcaaggatgctactccttcagattttgttcgcgctactgcaacgataccgatacaagcctcactccctttcggatggcttattgttggcgttgcacttcttgctgtttttcagagcgcttccaaaatcataaccctcaaaaagagatggcaactagcactctccaagggtgttcactttgtttgcaacttgctgttgttgtttgtaacagtttactcacaccttttgctcgttgctgctggccttgaagccccttttctctatctttatgctttagtctacttcttgcagagtataaactttgtaagaataataatgaggctttggctttgctgtaaatgccgttccaaaaacccattactttatgatgccaactattttctttgctggcatactaattgttacgactattgtataccttacaatagtgtaacttcttcaattgtcattacttcaggtgatggcacaacaagtcctatttctgaacatgactaccagattggtggttatactgaaaaatgggaatctggagtaaaagactgtgttgtattacacagttacttcacttcagactattaccagctgtactcaactcaattgagtacagacactggtgttgaacatgttaccttcttcatctacaataaaattgttgatgagcctgaagaacatgtccaaattcacacaatcgacggttcatccggagttgttaatccagtaatggaaccaatttatgatgaaccgacgacgactactagcgtgcctttgtaagcacaagctgatgagtacgaacttatgtactcattcgtttcggaagagacaggtacgttaatagttaatagcgtacttctttttcttgctttcgtggtattcttgctagttacactagccatccttactgcgcttcgattgtgtgcgtactgctgcaatattgttaacgtgagtcttgtaaaaccttctttttacgtttactctcgtgttaaaaatctgaattcttctagagttcctgatcttctggtctaaacgaactaaatattatattagtttttctgtttggaactttaattttagccatggcagattccaacggtactattaccgttgaagagcttaaaaagctccttgaacaatggaacctagtaataggtttcctattccttacatggatttgtcttctacaatttgcctatgccaacaggaataggtttttgtatataattaagttaattttcctctggctgttatggccagtaactttagcttgttttgtgcttgctgctgtttacagaataaattggatcaccggtggaattgctatcgcaatggcttgtcttgtaggcttgatgtggctcagctacttcattgcttctttcagactgtttgcgcgtacgcgttccatgtggtcattcaatccagaaactaacattcttctcaacgtgccactccatggcactattctgaccagaccgcttctagaaagtgaactcgtaatcggagctgtgatccttcgtggacatcttcgtattgctggacaccatctaggacgctgtgacatcaaggacctgcctaaagaaatcactgttgctacatcacgaacgctttcttattacaaattgggagcttcgcagcgtgtagcaggtgactcaggttttgctgcatacagtcgctacaggattggcaactataaattaaacacagaccattccagtagcagtgacaatattgctttgcttgtacagtaagtgacaacagatgtttcatctcgttgactttcaggttactatagcagagatattactaattattatgaggacttttaaagtttccatttggaatcttgattacatcataaacctcataattaaaaatttatctaagtcactaactgagaataaatattctcaattagatgaagagcaaccaatggagattgattaaacgaacatgaaaattattcttttcttggcactgataacactcgctacttgtgagctttatcactaccaagagtgtgttagaggtacaacagtacttttaaaagaaccttgctcttctggaacatnnnnnnnnnnnnnnnnnnnnnnnnnnnnnnnnnnnnnnnnnnnnnnnnnnnnnnnnnnnnnnnnnnnnnnnnnnnnnnnnnnnnnnnnnnnnnnnnnnnnnnnnnnnnnnnnnnnnnnnnnnnnnnnnnnnnnnnnnnnnnnnnnnnnnnnnnnnnnnnnnnnnnnnnnnnnnnnnnnnnnnnnnnnnnnnnnnnnnnnnnnnnnnnnnnnnnnnnnnnnnnnnnnnnnnnnnnnnnnnnnnnnnnnnnnnnnnnnnnnnnnnnnnnnnnnnnnnnnnnnnnnnnnnnnnnnnnnnnattccttgttttaattatgcttattatcttttggttctcacttgaactgcaagatcataatgaaacttgtcacgcctaaacgaacatgaaatttcttgttttcttaggaatcatcacaactgtagctgcatttcaccaagaatgtagtttacagtcatgtacttaacatcaaccatatgtagttgatgacccgtgtcctattcacttctattctaaatggtatattagagtaggagctataaaatcagcacctttaattgaattgtgcgtggatgaggctggttcttaatcacccattcagtgcatcgatatcggtaattatacagtttcctgtttaccttttacaattaattgccaggaacctaaattgggtagtcttgtagtgcgttgttcgttctatgaagactttttagagtatcatgacgttcgtgttgttttagatttcatctaaacgaacaaactaaatgtctctaaatggaccccaaaatcagcgaaatgcaccccgcattacgtttggtggaccctcagattcaactggcagtaaccagaatggagaacgcagtggggcgcgatcaaaacaacgtcggccccaaggtttacccaataatactgcgtcttggttcaccgctctcactcaacatggcaaggaagaccttaaattccctcgaggacaaggcgttccaattaacaccaatagcagtccagatgaccaaattggctactaccgaagagctaccagacgaattcgtggtggtgacggtaaaatgaaagatctcagtccaagatggtatttctactacctaggaactgggccagaagctggacttccctatggtgctaacaaagacggcatcatatgggttgcaactgagggagccttgaatacaccaaaagatcacattggcacccgcaatcctgctaacaatgctgcaatcgtgctacaacttcctcaaggaacaacattgccaaaaggcttctacgcagaagggagcagaggcggcagtcaagcctcttctcgttcctcatcacgtagtcgcaacagttcaagaaattcaactccaggcagcagtaaacgaacttctcctgctagaatggctggcaatggcggtgatgctgctcttgctttgctgctgcttgacagattgaaccagcttgagagcaaaatgtttggtaaaggccaacaacaacaaggccaaactgtcactaagaaatctgctgctgaggcttctaagaagcctcggcaaaaacgtactgccactaaagcatacaatgtaacacaagctttcggcagacgtggtccagaacaaacccaaggaaattttggggaccaggaactaatcagacaaggaactgattacaaacattggccgcaaattgcacaatttgcccccagcgcttcagcgttcttcggaatgtcgcgcattggcatggaagtcacaccttcgggaacgtggttgacctacacaggtgccatcaaattggatgacaaagatccaaatttcaaagatcaagtcattttgctgaataagcatattgacgcatacaaaacattcccaccaacagagcctaaaaaggacaaaaagaagaaggctgatgaaactcaagccttaccgcagagacagaagaaacagcaaactgtgactcttcttcctgctgcagatttggatgatttctccaaacaattgcaacaatccatgagcagtgctgactcaactcaggcctaaactcatgcagaccacacaaggcagatgggctatataaacgttttcgcttttccgtttacgatatatagtctactcttgtgcagaatgaattctcgtaactacatagcacaagtagatgtagttaactttaatctcacatagcaatctttaatcagtgtgtaacattagggaggacttgaaagagccaccacattttcaccgaggccacgcggagtacgatcgagtgtacaatgaacaatgctagggagagctgcctatatggaagagccctaatgtgtaaaattaattttagtagtgctatcc

SEQ ID NO: 292 - DNA, 29796 bp, Artificial Sequence
  SARS-CoV-2 variant
tgtagatctgttctctaaacgaactttaaaatctgtgtggctgtcactcggctgcatgcttagtgcactcacgcagtataattaataactaattactgtcgttgacaggacacgagtaactcgtctatcttctgcaggctgcttacggtttcgtccgtgttgcagccgatcatcagcacatctaggttttgtccgggtgtgaccgaaaggtaagatggagagccttgtccctggtttcaacgagaaaacacacgtccaactcagtttgcctgttttacaggttcgcgacgtgctcgtacgtggctttggagactccgtggaggaggtcttatcagaggcacgtcaacatcttaaagatggcacttgtggcttagtagaagttgaaaaaggcgttttgcctcaacttgaacagccctatgtgttcatcaaacgttcggatgctcgaactgcacctcatggtcatgttatggttgagctggtagcagaactcgaaggcattcagtacggtcgtagtggtgagacacttggtgtccttgtccctcatgtgggcgaaataccagtggcttaccgcaaggttcttcttcgtaagaacggtaataaaggagctggtggccatagttacggcgccgatctaaagtcatttgacttaggcgacgagcttggcactgatccttatgaagattttcaagaaaactggaacactaaacatagcagtggtgttacccgtgaactcatgcgtgagcttaacggaggggcatacactcgctatgtcgataacaacttctgtggccctgatggctaccctcttgagtgcattaaagaccttctagcacgtgctggtaaagcttcatgcactttgtctgaacaactggactttattgacactaagaggggtgtatactgctgccgtgaacatgagcatgaaattgcttggtacacggaacgttctgaaaagagctatgaattgcagacaccttttgaaattaaattggcaaagaaatttgacaccttcaatggggaatgtccaaattttgtatttcccttaaattccataatcaagactattcaaccaagggttgaaaagaaaaagcttgatggctttatgggtagaattcgatctgtctatccagttgcgtcaccaaatgaatgcaaccaaatgtgcctttcaactctcatgaagtgtgatcattgtggtgaaacttcatggcagacgggcgattttgttaaagccacttgcgaattttgtggcactgagaatttgactaaagaaggtgccactacttgtggttacttaccccaaaatgctgttgttaaaatttattgtccagcatgtcacaattcagaagtaggacctgagcatagtcttgccgaataccataatgaatctggcttgaaaaccattcttcgtaagggtggtcgcactattgcctttggaggctgtgtgttctcttatgttggttgccataacaagtgtgcctattgggttccacgtgctagcgctaacataggttgtaaccatacaggtgttgttggagaaggttccgaaggtcttaatgacaaccttcttgaaatactccaaaaagagaaagtcaacatcaatattgttggtgactttaaacttaatgaagagatcgccattattttggcatctttttctgcttccacaagtgcttttgtggaaactgtgaaaggtttggattataaagcattcaaacaaattgttgaatcctgtggtaattttaaagttacaaaaggaaaagctaaaaaaggtgcctggaatattggtgaacagaaatcaatactgagtcctctttatgcatttgcatcagaggctgctcgtgttgtacgatcaattttctcccgcactcttgaaactgctcaaaattctgtgcgtgttttacagaaggccgctataacaatactagatggaatttcacagtattcactgagactcattgatgctatgatgttcacatctgatttggctactaacaatctagttgtaatggcctacattacaggtggtgttgttcagttgacttcgcagtggctaactaacatctttggcactgtttatgaaaaactcaaacccgtccttgattggcttgaagagaagtttaaggaaggtgtagagtttcttagagacggttgggaaattgttaaatttatctcaacctgtgcttgtgaaattgtcggtggacaaattgtcacctgtgcaaaggaaattaaggagagtgttcagacattctttaagcttgtaaataaatttttggctttgtgtgctgactctatcattattggtggagctaaacttaaagccttgaatttaggtgaaacatttgtcacgcactcaaagggattgtacagaaagtgtgttaaatccagagaagaaactggcctactcatgcctctaaaagccccaaaagaaattatcttcttagagggagaaacacttcccacagaagtgttaacagaggaagttgtcttgaaaactggtgatttacaaccattagaacaacctactagtgaagctgttgaagctccattggttggtacaccagtttgtattaacgggcttatgttgctcgaaatcaaagacacagaaaagtactgtgcccttgcacctaatatgatggtaacaaacaataccttcacactcaaaggcggtgcaccaacaaaggttacttttggtgatgacactgtgatagaagtgcaaggttacaagagtgtgaatatcacttttgaacttgatgaaaggattgataaagtacttaatgagaagtgctctgcctatacagttgaactcggtacagaagtaaatgagttcgcctgtgttgtggcagatgctgtcataaaaactttgcaaccagtatctgaattacttacaccactgggcattgatttagatgagtggagtatggctacatactacttatttgatgagtctggtgagtttaaattggcttcacatatgtattgttctttttaccctccagatgaggatgaagaagaaggtgattgtgaagaagaagagtttgagccatcaactcaatatgagtatggtactgaagatgattaccaaggtaaacctttggaatttggtgccacttctgctgctcttcaacctgaagaagagcaagaagaagattggttagatgatgatagtcaacaaactgttggtcaacaagacggcagtgaggacaatcagacaactattattcaaacaattgttgaggttcaacctcaattagagatggaacttacaccagttgttcagactattgaagtgaatagttttagtggttatttaaaacttactgacaatgtatacattaaaaatgcagacattgtggaagaagctaaaaaggtaaaaccaacagtggttgttaatgcagccaatgtttaccttaaacatggaggaggtgttgcaggagccttaaataaggctactaacaatgccatgcaagttgaatctgatgattacatagctactaatggaccacttaaagtgggtggtagttgtgttttaagcggacacaatcttgctaaacactgtcttcatgttgtcggcccaaatgttaacaaaggtgaagacattcaacttcttaagagtgcttatgaaaattttaatcagcacgaagttctacttgcaccattattatcagctggtatttttggtgctgaccctatacattctttaagagtttgtgtagatactgttcgcacaaatgtctacttagctgtctttgataaaaatctctatgacaaacttgtttcaagctttttggaaatgaagagtgaaaagcaagttgaacaaaagatcgctgagattcctaaagaggaagttaagccatttataactgaaagtaaaccttcagttgaacagagaaaacaagatgataagaaaatcaaagcttgtgttgaagaagttacaacaactctggaagaaactaagttcctcacagaaaacttgttactttatattgacattaatggcaatcttcatccagattctgccactcttgttagtgacattgacatcactttcttaaagaaagatgctccatatatagtgggtgatgttgttcaagagggtgttttaactgctgtggttatacctactaaaaaggctggtggcactactgaaatgctagcgaaagctttgagaaaagtgccaacagacaattatataaccacttacccgggtcagggtttaaatggttacactgtagaggaggcaaagacagtgcttaaaaagtgtaaaagtgccttttacattctaccatctattatctctaatgagaagcaagaaattcttggaactgtttcttggaatttgcgagaaatgcttgcacatgcagaagaaacacgcaaattaatgcctgtctgtgtggaaactaaagccatagtttcaactatacagcgtaaatataagggtattaaaatacaagagggtgtggttgattatggtgctagattttacttttacaccagtaaaacaactgtagcgtcacttatcaacacacttaacgatctaaatgaaactcttgttacaatgccacttggctatgtaacacatggcttaaatttggaagaagctgctcggtatatgagatctctcaaagtgccagctacagtttctgtttcttcacctgatgctgttacagcgtataatggttatcttacttcttcttctaaaacacctgaagaacattttattgaaaccatctcacttgctggttcctataaagattggtcctattctggacaatctacacaactaggtatagaatttcttaagagaggtgataaaagtgtatattacactagtaatcctaccacattccacctagatggtgaagttatcacctttgacaatcttaagacacttctttctttgagagaagtgaggactattaaggtgtttacaacagtagacaacattaacctccacacgcaagttgtggacatgtcaatgacatatggacaacagtttggtccaacttatttggatggagctgatgttactaaaataaaacctcataattcacatgaaggtaaaacattttatgttttacctaatgatgacactctacgtgttgaggcttttgagtactaccacacaactgatcctagttttctgggtaggtacatgtcagcattaaatcacactaaaaagtggaaatacccacaagttaatggtttaacttctataaaatgggcagataacaactgttatcttgccactgcattgttaacactccaacaaatagagttgaagtttaatccacctgctctacaagatgcttattacagagcaagggctggtgaagctgataacttttgtgcacttatcttagcctactgtaataagacagtaggtgagttaggtgatgttagagaaacaatgagttacttgtttcaacatgccaatttagattcttgcaaaagagtcttgaacgtggtgtgtaaaacttgtggacaacagcagacaacccttaagggtgtagaagctgttatgtacatgggcacactttcttatgaacaatttaagaaaggtgttcagataccttgtacgtgtggtaaacaagctacaaaatatctagtacaacaggagtcaccttttgttatgatgtcagcaccacctgctcagtatgaacttaagcatggtacatttacttgtgctagtgagtacactggtaattaccagtgtggtcactataaacatataacttctaaagaaactttgtattgcatagacggtgctttacttacaaagtcctcagaatacaaaggtcctattacggatgttttctacaaagaaaacagttacacaacaaccataaaaccagttacttataaattggatggtgttgtttgtacagaaattgaccctaagttggacaattattataagaaagacaattcttattttacagagcaaccaattgatcttgtaccaaaccaaccatatccaaacgcaagcttcgataattttaagtttgtatgtgataatatcaaatttgctgatgatttaaaccagttaactggttataagaaacctgcttcaagagagcttaaagttacatttttccctgacttaaatggtgatgtggtggctattgattataaacactacacaccctcttttaagaaaggagctaaattgttacataaacctattgtttggcatgttaacaatgcaactaataaagccacgtataaaccaaatacctggtgtatacgttgtctttggagcacaaaaccagttgaaacatcaaattcgtttgatgtactgaagtcagaggacgcgcagggaatggataatcttgcctgcgaagatctaaaaccagtctctgaagaagtagtggaaaatcctaccatacagaaagacgttcttgagtgtaatgtgaaaactaccgaagttgtaggagacattatacttaaaccagcaaataatagtttaaaaattacagaagaggttggccacacagatctaatggctgcttatgtagacaattctagtcttactattaagaaacctaatgaattatctagagtattaggtttgaaaacccttgctactcatggtttagctgctgttaatagtgtcccttgggatactatagctaattatgctaagccttttcttaacaaagttgttagtacaactactaacatagttacacggtgtttaaaccgtgtttgtactaattatatgccttatttctttactttattgctacaattgtgtacttttactagaagtacaaattctagaattaaagcatctatgccgactactatagcaaagaatactgttaagagtgtcggtaaattttgtctagaggcttcatttaattatttgaagtcacctaatttttctaaactgataaatattacaatttggtttttactattaagtgtttgcctaggttctttaatctactcaaccgctgctttaggtgttttaatgtctaatttaggcatgccttcttactgtactggttacagagaaggctatttgaactctactaatgtcactattgcaacctactgtactggttctataccttgtagtgtttgtcttagtggtttagattctttagacacctatccttctttagaaactatacaaattaccatttcatcttttaaatgggatttaactgcttttggcttagttgcagagtggtttttggcatatattcttttcactaggtttttctatgtacttggattggctgcaatcatgcaattgtttttcagctattttgcagtacattttattagtaattcttggcttatgtggttaataattaatcttgtacaaatggccccgatttcagctatggttagaatgtacatcttctttgcatcattttattatgtatggaaaagttatgtgcatgttgtagacggttgtaattcatcaacttgtatgatgtgttacaaacgtaatagagcaacaagagtcgaatgtacaactattgttaatggtgttagaaggtccttttatgtctatgctaatggaggtaaaggcttttgcaaactacacaattggaattgtgttaattgtgatacattctgtgctggtagtacatttattagtgatgaagttgcgagagacttgtcactacagtttaaaagaccaataaatcctactgaccagtcttcttacatcgttgatagtgttacagtgaagaatggttccatccatctttactttgataaagctggtcaaaagacttatgaaagacattctctctctcattttgttaacttagacaacctgagagctaataacactaaaggttcattgcctattaatgttatagtttttgatggtaaatcaaaatgtgaagaatcatctgcaaaatcagcgtctgtttactacagtcagcttatgtgtcaacctatactgttactagatcaggcattagtgtctgatgttggtgatagtgcggaagttgcagttaaaatgtttgatgcttacgttaatacgttttcatcaacttttaacgtaccaatggaaaaactcaaaacactagttgcaactgcagaagctgaacttgcaaagaatgtgtccttagacaatgtcttatctacttttatttcagcagctcggcaagggtttgttgattcagatgtagaaactaaagatgttgttgaatgtcttaaattgtcacatcaatctgacatagaagttactggcgatagttgtaataactatatgctcacctataacaaagttgaaaacatgacaccccgtgaccttggtgcttgtattgactgtagtgcgcgtcatattaatgcgcaggtagcaaaaagtcacaacattgctttgatatggaacgttaaagatttcatgtcattgtctgaacaactacgaaaacaaatacgtagtgctgctaaaaagaataacttaccttttaagttgacatgtgcaactactagacaagttgttaatgttgtaacaacaaagatagcacttaagggtggtaaaattgttaataattggttgaagcagttaattaaagttacacttgtgttcctttttgttgctgctattttctatttaataacacctgttcatgtcatgtctaaacatactgacttttcaagtgaaatcataggatacaaggctattgatggtggtgtcactcgtgacatagcatctacagatacttgttttgctaacaaacatgctgattttgacacatggtttagccagcgtggtggtagttatactaatgacaaagcttgcccattgattgctgcagtcataacaagagaagtgggttttgtcgtgcctggtttgcctggcacgatattacgcacaactaatggtgactttttgcatttcttacctagagtttttagtgcagttggtaacatctgttacacaccatcaaaacttatagagtacactgactttgcaacatcagcttgtgttttggctgctgaatgtacaatttttaaagatgcttctggtaagccagtaccatattgttatgataccaatgtactagaaggttctgttgcttatgaaagtttacgccctgacacacgttatgtgctcatggatggctctattattcaatttcctaacacctaccttgaaggttctgttagagtggtaacaacttttgattctgagtactgtaggcacggcacttgtgaaagatcagaagctggtgtttgtgtatctactagtggtagatgggtacttaacaatgattattacagatctttaccaggagttttctgtggtgtagatgctgtaaatttacttactaatatgtttacaccactaattcaacctattggtgctttggacatatcagcatctatagtagctggtggtattgtagctatcgtagtaacatgccttgcctactattttatgaggtttagaagagcttttggtgaatacagtcatgtagttgcctttaatactttactattccttatgtcattcactgtactctgtttaacaccagtttactcattcttacctggtgtttattctgttatttacttgtacttgacattttatcttactaatgatgtttcttttttagcacatattcagtggatggttatgttcacacctttagtacctttctggataacaattgcttatatcatttgtatttccacaaagcatttctattggttctttagtaattacctaaagagacgtgtagtctttaatggtgtttcctttagtacttttgaagaagctgcgctgtgcacctttttgttaaataaagaaatgtatctaaagttgcgtagtgatgtgctattacctcttacgcaatataatagatacttagctctttataataagtacaagtattttagtggagcaatggatacaactagctacagagaagctgcttgttgtcatctcgcaaaggctctcaatgacttcagtaactcaggttctgatgttctttaccaaccaccacaaacctctatcacctcagctgttttgcagagtggttttagaaaaatggcattcccatctggtaaagttgagggttgtatggtacaagtaacttgtggtacaactacacttaacggtctttggcttgatgacgtagtttactgtccaagacatgtgatctgcacctctgaagacatgcttaaccctaattatgaagatttactcattcgtaagtctaatcataatttcttggtacaggctggtaatgttcaactcagggttattggacattctatgcaaaattgtgtacttaagcttaaggttgatacagccaatcctaagacacctaagtataagtttgttcgcattcaaccaggacagactttttcagtgttagcttgttacaatggttcaccatctggtgtttaccaatgtgctatgaggcccaatttcactattaagggttcattccttaatggttcatgtggtagtgttggttttaacatagattatgactgtgtctctttttgttacatgcaccatatggaattaccaactggagttcatgctggcacagacttagaaggtaacttttatggaccttttgttgacaggcaaacagcacaagcagctggtacggacacaactattacagttaatgttttagcttggttgtacgctgctgttataaatggagacaggtggtttctcaatcgatttaccacaactcttaatgactttaaccttgtggctatgaagtacaattatgaacctctaacacaagaccatgttgacatactaggacctctttctgctcaaactggaattgccgttttagatatgtgtgcttcattaaaagaattactgcaaaatggtatgaatggacgtaccatattgggtagtgctttattagaagatgaatttacaccttttgatgttgttagacaatgctcaggtgttactttccaaagtgcagtgaaaagaacaatcaagggtacacaccactggttgttactcacaattttgacttcacttttagttttagtccagagtactcaatggtctttgttcttttttttgtatgaaaatgcctttttaccttttgctatgggtattattgctatgtctgcttttgcaatgatgtttgtcaaacataagcatgcatttctctgtttgtttttgttaccttctcttgccactgtagcttattttaatatggtctatatgcctgctagttgggtgatgcgtattatgacatggttggatatggttgatactagtttgaagctaaaagactgtgttatgtatgcatcagctgtagtgttactaatccttatgacagcaagaactgtgtatgatgatggtgctaggagagtgtggacacttatgaatgtcttgacactcgtttataaagtttattatggtaatgctttagatcaagccatttccatgtgggctcttataatctctgttacttctaactactcaggtgtagttacaactgtcatgtttttggccagaggtattgtttttatgtgtgttgagtattgccctattttcttcataactggtaatacacttcagtgtataatgctagtttattgtttcttaggctatttttgtacttgttactttggcctcttttgtttactcaaccgctactttagactgactcttggtgtttatgattacttagtttctacacaggagtttagatatatgaattcacagggactactcccacccaagaatagcatagatgccttcaaactcaacattaaattgttgggtgttggtggcaaaccttgtatcaaagtagccactgtacagtctaaaatgtcagatgtaaagtgcacatcagtagtcttactctcagttttgcaacaactcagagtagaatcatcatctaaattgtgggctcaatgtgtccagttacacaatgacattctcttagctaaagatactactgaagcctttgaaaaaatggtttcactactttctgttttgctttccatgcagggtgctgtagacataaacaagctttgtgaagaaatgctggacaacagggcaaccttacaagctatagcctcagagtttagttcccttccatcatatgcagcttttgctactgctcaagaagcttatgagcaggctgttgctaatggtgattctgaagttgttcttaaaaagttgaagaagtctttgaatgtggctaaatctgaatttgaccgtgatgcagccatgcaacgtaagttggaaaagatggctgatcaagctatgacccaaatgtataaacaggctagatctgaggacaagagggcaaaagttactagtgctatgcagacaatgcttttcactatgcttagaaagttggataatgatgcactcaacaacattatcaacaatgcaagagatggttgtgttcccttgaacataatacctcttacaacagcagccaaactaatggttgtcataccagactataacacatataaaaatacgtgtgatggtacaacatttacttatgcatcagcattgtgggaaatccaacaggttgtagatgcagatagtaaaattgttcaacttagtgaaattagtatggacaattcacctaatttagcatggcctcttattgtaacagctttaagggccaattctgctgtcaaattacagaataatgagcttagtcctgttgcactacgacagatgtcttgtgctgccggtactacacaaactgcttgcactgatgacaatgcgttagcttactacaacacaacaaagggaggtaggtttgtacttgcactgttatccgatttacaggatttgaaatgggctagattccctaagagtgatggaactggtactatctatacagaactggaaccaccttgtaggtttgttacagacacacctaaaggtcctaaagtgaagtatttatactttattaaaggattaaacaacctaaatagaggtatggtacttggtagtttagctgccacagtacgtctacaagctggtaatgcaacagaagtgcctgccaattcaactgtattatctttctgtgcttttgctgtagatgctgctaaagcttacaaagattatctagctagtgggggacaaccaatcactaattgtgttaagatgttgtgtacacacactggtactggtcaggcaataacagttacaccggaagccaatatggatcaagaatcctttggtggtgcatcgtgttgtctgtactgccgttgccacatagatcatccaaatcctaaaggattttgtgacttaaaaggtaagtatgtacaaatacctacaacttgtgctaatgaccctgtgggttttacacttaaaaacacagtctgtaccgtctgcggtatgtggaaaggttatggctgtagttgtgatcaactccgcgaacccatgcttcagtcagctgatgcacaatcgtttttaaacgggtttgcggtgtaagtgcagcccgtcttacaccgtgcggcacaggcactagtactgatgtcgtatacagggcttttgacatctacaatgataaagtagctggttttgctaaattcctaaaaactaattgttgtcgcttccaagaaaaggacgaagatgacaatttaattgattcttactttgtagttaagagacacactttctctaactaccaacatgaagaaacaatttataatttacttaaggattgtccagctgttgctaaacatgacttctttaagtttagaatagacggtgacatggtaccacatatatcacgtcaacgtcttactaaatacacaatggcagacctcgtctatgctttaaggcattttgatgaaggtaattgtgacacattaaaagaaatacttgtcacatacaattgttgtgatgatgattatttcaataaaaaggactggtatgattttgtagaaaacccagatatattacgcgtatacgccaacttaggtgaacgtgtacgccaagctttgttaaaaacagtacaattctgtgatgccatgcgaaatgctggtattgttggtgtactgacattagataatcaagatctcaatggtaactggtatgatttcggtgatttcatacaaaccacgccaggtagtggagttcctgttgtagattcttattattcattgttaatgcctatattaaccttgaccagggctttaactgcagagtcacatgttgacactgacttaacaaagccttacattaagtgggatttgttaaaatatgacttcacggaagagaggttaaaactctttgaccgttattttaaatattgggatcagacataccacccaaattgtgttaactgtttggatgacagatgcattctgcattgtgcaaactttaatgttttattctctacagtgttcccacttacaagttttggaccactagtgagaaaaatatttgttgatggtgttccatttgtagtttcaactggataccacttcagagagctaggtgttgtacataatcaggatgtaaacttacatagctctagacttagttttaaggaattacttgtgtatgctgctgaccctgctatgcacgctgcttctggtaatctattactagataaacgcactacgtgcttttcagtagctgcacttactaacaatgttgcttttcaaactgtcaaacctggtaattttaacaaagacttctatgactttgctgtgtctaagggtttctttaaggaaggaagttctgttgaattaaaacacttcttctttgctcaggatggtaatgctgctatcagcgattatgactactatcgttataatctaccaacaatgtgtgatatcagacaactactatttgtagttgaagttgttgataagtactttgattgttacgatggtggctgtattaatgctaaccaagtcatcgtcaacaacctagacaaatcagctggttttccatttaataaatggggtaaggctagactttattatgattcaatgagttatgaggatcaagatgcacttttcgcatatacaaaacgtaatgtcatccctactataactcaaatgaatcttaagtatgccattagtgcaaagaatagagctcgcaccgtagctggtgtctctatctgtagtactatgaccaatagacagtttcatcaaaaattattgaaatcaatagccgccactagaggagctactgtagtaattggaacaagcaaattctatggtggttggcacaacatgttaaaaactgtttatagtgatgtagaaaaccctcatcttatgggttgggattatcctaaatgtgatagagccatgcctaacatgcttagaattatggcctcacttgttcttgctcgcaaacatacaacgtgttgtagcttgtcacaccgtttctatagattagctaatgagtgtgctcaagtattgagtgaaatggtcatgtgtggcggttcactatatgttaaaccaggtggaacctcatcaggagatgccacaactgcttatgctaatagtgtttttaacatttgtcaagctgtcacggccaatgttaatgcacttttatctactgatggtaacaaaattgccgataagtatgtccgcaatttacaacacagactttatgagtgtctctatagaaatagagatgttgacacagactttgtgaatgagttttacgcatatttgcgtaaacatttctcaatgatgatactctctgacgatgctgttgtgtgtttcaatagcacttatgcatctcaaggtctagtggctagcataaagaactttaagtcagttctttattatcaaaacaatgtttttatgtctgaagcaaaatgttggactgagactgaccttactaaaggacctcatgaattttgctctcaacatacaatgctagttaaacagggtgatgattatgtgtaccttccttacccagatccatcaagaatcctaggggccggctgttttgtagatgatatcgtaaaaacagatggtacacttatgattgaacggttcgtgtctttagctatagatgcttacccacttactaaacatcctaatcaggagtatgctgatgtctttcatttgtacttacaatacataagaaagctacatgatgagttaacaggacacatgttagacatgtattctgttatgcttactaatgataacacctcaaggtattgggaacctgagttttatgaggctatgtacacaccgcatacagtcttacaggctgttggggcttgtgttctttgcaattcacagacttcattaagatgtggtgcttgcatacgtagaccattcttatgttgtaaatgctgttacgaccatgtcatatcaacatcacataaattagtcttgtctgttaatccgtatgtttgcaatgctccaggttgtgatgtcacagatgtgactcaactttacttaggaggtatgagctattattgtaaatcacataaaccatccattagttttccattgtgtgctaatggacaagtttttggtttatataaaaatacatgtgttggtagcgataatgttactgactttaatgcaattgcaacatgtgactggacaaatgctggtgattacattttagctaacacctgtactgaaagactcaagctttttgcagcagaaacgctcaaagctactgaggagacatttaaactgtcttatggtattgctactgtacgtgaagtgctgtctgacagagaattacatctttcatgggaagttggtaaacctagaccaccacttaaccgaaattatgtctttactggttatcgtgtaactaaaaacagtaaagtacaaataggagagtacacctttgaaaaaggtgactatggtgatgctgttgtttaccgaggtacaacaacttacaaattaaatgttggtgattattttgtgctgacatcacatacagtaatgccattaagtgcacctacactagtgccacaagagcactatgttagaattactggcttatacccaacactcaatatctcagatgagttttctagcaatgttgcaaattatcaaaaggttggtatgcaaaagtattctacactccagggaccacctggtactggtaagagtcattttgctattggcctagctctctactacccttctgctcgcatagtgtatacagcttgctctcatgccgctgttgatgcactatgtgagaaggcattaaaatatttgcctatagataaatgtagtagaattatacctgcacgtgctcgtgtagagtgttttgataaattcaaagtgaattcaacattagaacagtatgtcttttgtactgtaaatgcattgcctgagacgacagcagatatagttgtctttgatgaaatttcaatggccacaaattatgatttgagtgttgtcaatgccagattacgtgctaagcactatgtgtacattggcgaccctgctcaattacctgcaccacgcacattgctaactaagggcacactagaaccagaatatttcaattcagtgtgtagacttatgaaaactataggtccagacatgttcctcggaacttgtcggcgttgtcctgctgaaattgttgacactgtgagtgctttggtttatgataataggcttaaagcacataaagacaaatcagctcaatgctttaaaatgttttataagggtgttatcacgcatgatgtttcatctgcaattaacaggccacaaataggcgtggtaagagaattccttacacgtaaccctgcttggagaaaagctgtctttatttcaccttataattcacagaatgctgtagcctcaaagattttgggactaccaactcaaactgttgattcatcacagggctcagaatatgactatgtcatattcactcaaaccactgaaacagctcactcttgtaatgtaaacagatttaatgttgctattaccagagcaaaagtaggcatactttgcataatgtctgatagagacctttatgacaagttgcaatttacaagtcttgaaattccacgtaggaatgtggcaactttacaagctgaaaatgtaacaggactctttaaagattgtagtaaggtaatcactgggttacatcctacacaggcacctacacacctcagtgttgacactaaattcaaaactgaaggtttatgtgttgacatacctggcatacctaaggacatgacctatagaagactcatctctatgatgggttttaaaatgaattatcaagttaatggttaccctaacatgtttatcacccgcgaagaagctataagacatgtacgtgcatggattggcttcgatgtcgaggggtgtcatgctactagagaagctgttggtaccaatttacctttacagctaggtttttctacaggtgttaacctagttgctgtacctacaggttatgttgatacacctaataatacagatttttccagagttagtgctaaaccaccgcctggagatcaatttaaacacctcataccacttatgtacaaaggacttccttggaatgtagtgcgtataaagattgtacaaatgttaagtgacacacttaaaaatctctctgacagagtcgtatttgtcttatgggcacatggctttgagttgacatctatgaagtattttgtgaaaataggacctgagcgcacctgttgtctatgtgatagacgtgccacatgcttttccactgcttcagacacttatgcctgttggcatcattctattggatttgattacgtctataatccgtttatgattgatgttcaacaatggggttttacaggtaacctacaaagcaaccatgatctgtattgtcaagtccatggtaatgcacatgtagctagttgtgatgcaatcatgactaggtgtctagctgtccacgagtgctttgttaagcgtgttgactggactattgaatatcctataattggtgatgaactgaagattaatgcggcttgtagaaaggttcaacacatggttgttaaagctgcattattagcagacaaattcccagttcttcacgacattggtaaccctaaagctattaagtgtgtacctcaagctgatgtagaatggaagttctatgatgcacagccttgtagtgacaaagcttataaaatagaagaattattctattcttatgccacacattctgacaaattcacagatggtgtatgcctattttggaattgcaatgtcgatagatatcctgctaattccattgtttgtagatttgacactagagtgctatctaaccttaacttgcctggttgtgatggtggcagtttgtatgtaaataaacatgcattccacacaccagcttttgataaaagtgcttttgttaatttaaaacaattaccatttttctattactctgacagtccatgtgagtctcatggaaaacaagtagtgtcagatatagattatgtaccactaaagtctgctacgtgtataacacgttgcaatttaggtggtgctgtctgtagacatcatgctaatgagtacagattgtatctcgatgcttataacatgatgatctcagctggctttagcttgtgggtttacaaacaatttgatacttataacctctggaacacttttacaagacttcagagtttagaaaatgtggcttttaatgttgtaaataagggacactttgatggacaacagggtgaagtaccagtttctatcattaataacactgtttacacaaaagttgatggtgttgatgtagaattgtttgaaaataaaacaacattacctgttaatgtagcatttgagctttgggctaagcgcaacattaaaccagtaccagaggtgaaaatactcaataatttgggtgtggacattgctgctaatactgtgatctgggactacaaaagagatgctccagcacatatatctactattggtgtttgttctatgactgacatagccaagaaaccaactgaaacgatttgtgcaccactcactgtcttttttgatggtagagttgatggtcaagtagacttatttagaaatgcccgtaatggtgttcttattacagaaggtagtgttaaaggtttacaaccatctgtaggtcccaaacaagctagtcttaatggagtcacattaattggagaagccgtaaaaacacagttcaattattataagaaagttgatggtgttgtccaacaattacctgaaacttactttactcagagtagaaatttacaagaatttaaacccaggagtcaaatggaaattgatttcttagaattagctatggatgaattcattgaacggtataaattagaaggctatgccttcgaacatatcgtttatggagattttagtcatagtcagttaggtggtttacatctactgattggactagctaaacgttttaaggaatcaccttttgaattagaagattttattcctatggacagtacagttaaaaactatttcataacagatgcgcaaacaggttcatctaagtgtgtgtgttctgttattgatttattacttgatgattttgttgaaataataaaatcccaagatttatctgtagtttctaaggttgtcaaagtgactattgactatacagaaatttcatttatgctttggtgtaaagatggccatgtagaaacattttacccaaaattacaatctagtcaagcgtggcaaccgggtgttgctatgcctaatctttacaaaatgcaaagaatgctattagaaaagtgtgaccttcaaaattatggtgatagtgcaacattacctaaaggcataatgatgaatgtcgcaaaatatactcaactgtgtcaatatttaaacacattaacattagctgtaccctataatatgagagttatacattttggtgctggttctgataaaggagttgcaccaggtacagctgttttaagacagtggttgcctacgggtacgctgcttgtcgattcagatcttaatgactttgtctctgatgcagattcaactttgattggtgattgtgcaactgtacatacagctaataaatgggatctcattattagtgatatgtacgaccctaagactaaaaatgttacaaaagaaaatgactctaaagagggttttttcacttacatttgtgggtttatacaacaaaagctagctcttggaggttccgtggctataaagataacagaacattcttggaatgctgatctttataagctcatgggacacttcgcatggtggacagcctttgttactaatgtgaatgcgtcatcatctgaagcatttttaattggatgtaattatcttggcaaaccacgcgaacaaatagatggttatgtcatgcatgcaaattacatattttggaggaatacaaatccaattcagttgtcttcctattctttatttgacatgagtaaatttccccttaaattaaggggtactgctgttatgtctttaaaagaaggtcaaatcaatgatatgattttatctcttcttagtaaaggtagacttataattagagaaaacaacagagttgttatttctagtgatgttcttgttaacaactaaacgaacaatgtttgtttttcttgttttattgccactagtctctagtcagtgtgttaatcttacaaccagaactcaattaccccctgcatacactaattctttcacacgtggtgtttattaccctgacaaagttttcagatcctcagttttacattcaactcaggacttgttcttacctttcttttccaatgttacttggttccatgctatctctgggaccaatggtactaagaggtttgataaccctgtcctaccatttaatgatggtgtttattttgcttccactgagaagtctaacataataagaggctggatttttggtactactttagattcgaagacccagtccctacttattgttaataacgctactaatgttgttattaaagtctgtgaatttcaattttgtaatgatccatttttgggtgtttaccacaaaaacaacaaaagttggatggaaagtgagttcagagtttattctagtgcgaataattgcacttttgaatatgtctctcagccttttcttatggaccttgaaggaaaacagggtaatttcaaaaatcttagggaatttgtgtttaagaatattgatggttattttaaaatatattctaagcacacgcctattaatttagtgcgtgatctccctcagggtttttcggctttagaaccattggtagatttgccaataggtattaacatcactaggtttcaaactttacttgctttacatagaagttatttgactcctggtgattcttcttcaggttggacagctggtgctgcagcttattatgtgggttatcttcaacctaggacttttctattaaaatataatgaaaatggaaccattacagatgctgtagactgtgcacttgaccctctctcagaaacaaagtgtacgttgaaatccttcactgtagaaaaaggaatctatcaaacttctaactttagagtccaaccaacagaatctattgttagatttcctaatattacaaacttgtgcccttttggtgaagtttttaacgccaccagatttgcatctgtttatgcttggaacaggaagagaatcagcaactgtgttgctgattattctgtcctatataattccgcatcattttccacttttaagtgttatggagtgtctcctactaaattaaatgatctctgctttactaatgtctatgcagattcatttgtaattagaggtgatgaagtcagacaaatcgctccagggcaaactggaaagattgctgattataattataaattaccagatgattttacaggctgcgttatagcttggaattctaacaatcttgattctaaggttggtggtaattataattacctgtatagattgtttaggaagtctaatctcaaaccttttgagagagatatttcaactgaaatctatcaggccggtagcacaccttgtaatggtgttgaaggttttaattgttactttcctttacaatcatatggtttccaacccacttatggtgttggttaccaaccatacagagtagtagtactttcttttgaacttctacatgcaccagcaactgtttgtggacctaaaaagtctactaatttggttaaaaacaaatgtgtcaatttcaacttcaatggtttaacaggcacaggtgttcttactgagtctaacaaaaagtttctgcctttccaacaatttggcagagacattgatgacactactgatgctgtccgtgatccacagacacttgagattcttgacattacaccatgttcttttggtggtgtcagtgttataacaccaggaacaaatacttctaaccaggttgctgttctttatcagggtgttaactgcacagaagtccctgttgctattcatgcagatcaacttactcctacttggcgtgtttattctacaggttctaatgtttttcaaacacgtgcaggctgtttaataggggctgaacatgtcaacaactcatatgagtgtgacatacccattggtgcaggtatatgcgctagttatcagactcagactaattctcatcggcgggcacgtagtgtagctagtcaatccatcattgcctacactatgtcacttggtgcagaaaattcagttgcttactctaataactctattgccatacccataaattttactattagtgttaccacagaaattctaccagtgtctatgaccaagacatcagtagattgtacaatgtacatttgtggtgattcaactgaatgcagcaatcttttgttgcaatatggcagtttttgtacacaattaaaccgtgctttaactggaatagctgttgaacaagacaaaaacacccaagaagtttttgcacaagtcaaacaaatttacaaaacaccaccaattaaagattttggtggttttaatttttcacaaatattaccagatccatcaaaaccaagcaagaggtcatttattgaagatctacttttcaacaaagtgacacttgcagatgctggcttcatcaaacaatatggtgattgccttggtgatattgctgctagagacctcatttgtgcacaaaagtttaacggccttactgttttgccacctttgctcacagatgaaatgattgctcaatacacttctgcactgttagcgggtacaatcacttctggttggacctttggtgcaggtgctgcattacaaataccatttgctatgcaaatggcttataggtttaatggtattggagttacacagaatgttctctatgagaaccaaaaattgattgccaaccaatttaatagtgctattggcaaaattcaagactcactttcttccacagcaagtgcacttggaaaacttcaagatgtggtcaaccaaaatgcacaagctttaaacacgcttgttaaacaacttagctccaattttggtgcaatttcaagtgttttaaatgatatccttgcacgtcttgacaaagttgaggctgaagtgcaaattgataggttgatcacaggcagacttcaaagtttgcagacatatgtgactcaacaattaattagagctgcagaaatcagagcttctgctaatcttgctgctactaaaatgtcagagtgtgtacttggacaatcaaaaagagttgatttttgtggaaagggctatcatcttatgtccttccctcagtcagcacctcatggtgtagtcttcttgcatgtgacttatgtccctgcacaagaaaagaacttcacaactgctcctgccatttgtcatgatggaaaagcacactttcctcgtgaaggtgtctttgtttcaaatggcacacactggtttgtaacacaaaggaatttttatgaaccacaaatcattactacacacaacacatttgtgtctggtaactgtgatgttgtaataggaattgtcaacaacacagtttatgatcctttgcaacctgaattagactcattcaaggaggagttagataaatattttaagaatcatacatcaccagatgttgatttaggtgacatctctggcattaatgcttcagttgtaaacattcaaaaagaaattgaccgcctcaatgaggttgccaagaatttaaatgaatctctcatcgatctccaagaacttggaaagtatgagcagtatataaaatggccatggtacatttggctaggttttatagctggcttgattgccatagtaatggtgacaattatgctttgctgtatgaccagttgctgtagttgtctcaagggctgttgttcttgtggatcctgctgcaaatttgatgaagacgactctgagccagtgctcaaaggagtcaaattacattacacataaacgaacttatggatttgtttatgagaatcttcacaattggaactgtaactttgaagcaaggtgaaatcaaggatgctactccttcagattttgttcgcgctactgcaacgataccgatacaagcctcactccctttcggatggcttattgttggcgttgcacttcttgctgtttttcagagcgcttccaaaatcataaccctcaaaaagagatggcaactagcactctccaagggtgttcactttgtttgcaacttgctgttgttgtttgtaacagtttactcacaccttttgctcgttgctgctggccttgaagccccttttctctatctttatgctttagtctacttcttgcagagtataaactttgtaagaataataatgaggctttggctttgctggaaatgccgttccaaaaacccattactttatgatgccaactattttctttgctggcatactaattgttacgactattgtataccttacaatagtgtaacttcttcaattgtcattacttcaggtgatggcacaacaagtcctatttctgaacatgactaccagattggtggttatactgaaaaatgggaatctggagtaaaagactgtgttgtattacacagttacttcacttcagactattaccagctgtactcaactcaattgagtacagacactggtgttgaacatgttaccttcttcatctacaataaaattgttgatgagcctgaagaacatgtccaaattcacacaatcgacggttcatccggagttgttaatccagtaatggaaccaatttatgatgaaccgacgacgactactagcgtgcctttgtaagcacaagctgatgagtacgaacttatgtactcattcgtttcggaagagacaggtacgttaatagttaatagcgtacttctttttcttgctttcgtggtattcttgctagttacactagccatccttactgcgcttcgattgtgtgcgtactgctgcaatattgttaacgtgagtcttgtaaaaccttctttttacgtttactctcgtgttaaaaatctgaattcttctagagttcctgatcttctggtctaaacgaactaaatattatattagtttttctgtttggaactttaattttagccatggcagattccaacggtactattaccgttgaagagcttaaaaagctccttgaacaatggaacctagtaataggtttcctattccttacatggatttgtcttctacaatttgcctatgccaacaggaataggtttttgtatataattaagttaattttcctctggctgttatggccagtaactttagcttgttttgtgcttgctgctgtttacagaataaattggatcaccggtggaattgctatcgcaatggcttgtcttgtaggcttgatgtggctcagctacttcattgcttctttcagactgtttgcgcgtacgcgttccatgtggtcattcaatccagaaactaacattcttctcaacgtgccactccatggcactattctgaccagaccgcttctagaaagtgaactcgtaatcggagctgtgatccttcgtggacatcttcgtattgctggacaccatctaggacgctgtgacatcaaggacctgcctaaagaaatcactgttgctacatcacgaacgctttcttattacaaattgggagcttcgcagcgtgtagcaggtgactcaggttttgctgcatacagtcgctacaggattggcaactataaattaaacacagaccattccagtagcagtgacaatattgctttgcttgtacagtaagtgacaacagatgtttcatctcgttgactttcaggttactatagcagagatattactaattattatgaggacttttaaagtttccatttggaatcttgattacatcataaacctcataattaaaaatttatctaagtcactaactgagaataaatattctcaattagatgaagagcaaccaatggagattgattaaacgaacatgaaaattattcttttcttggcactgataacactcgctacttgtgagctttatcactaccaagagtgtgttagaggtacaacagtacttttaaaagaaccttgctcttctggaacatacgagggcaattcaccatttcatcctctagctgataacaaatttgcactgacttgctttagcactcaatttgcttttgcttgtcctgacggcgtaaaacacgtctatcagttacgtgccagatcagtttcacctaaactgttcatcagacaagaggaagttcaagaactttactctccaatttttcttattgttgcggcaatagtgtttataacactttgcttcacactcaaaagaaagacagaatgattgaactttcattaattgacttctatttgtgctttttagcctttctgctattccttgttttaattatgcttattatcttttggttctcacttgaactgcaagatcataatgaaacttgtcacgcctaaacgaacatgaaatttcttgttttcttaggaatcatcacaactgtagctgcatttcaccaagaatgtagtttacagtcatgtacttaacatcaaccatatgtagttgatgacccgtgtcctattcacttctattctaaatggtatattagagtaggagctataaaatcagcacctttaattgaattgtgcgtggatgaggctggttctaaatcacccattcagtgcatcgatatcggtaattatacagtttcctgtttaccttttacaattaattgccaggaacctaaattgggtagtcttgtagtgcgttgttcgttctatgaagactttttagagtatcatgacgttcgtgttgttttagatttcatctaaacgaacaaactaaatgtctctaaatggaccccaaaatcagcgaaatgcaccccgcattacgtttggtggaccctcagattcaactggcagtaaccagaatggagaacgcagtggggcgcgatcaaaacaacgtcggccccaaggtttacccaataatactgcgtcttggttcaccgctctcactcaacatggcaaggaagaccttaaattccctcgaggacaaggcgttccaattaacaccaatagcagtccagatgaccaaattggctactaccgaagagctaccagacgaattcgtggtggtgacggtaaaatgaaagatctcagtccaagatggtatttctactacctaggaactgggccagaagctggacttccctatggtgctaacaaagacggcatcatatgggttgcaactgagggagccttgaatacaccaaaagatcacattggcacccgcaatcctgctaacaatgctgcaatcgtgctacaacttcctcaaggaacaacattgccaaaaggcttctacgcagaagggagcagaggcggcagtcaagcctcttctcgttcctcatcacgtagtcgcaacagttcaagaaattcaactccaggcagcagtaaacgaacttctcctgctagaatggctggcaatggcggtgatgcggctcttgctttgctgctgcttgacagattgaaccagcttgagagcaaaatgtttggtaaaggccaacaacaacaaggccaaactgtcactaagaaatctgctgctgaggcttctaagaagcctcggcaaaaacgtactgccactaaagcatacaatgtaacacaagctttcggcagacgtggtccagaacaaacccaaggaaattttggggaccaggaactaatcagacaaggaactgattacaaacattggccgcaaattgcacaatttgcccccagcgcttcagcgttcttcggaatgtcgcgcattggcatggaagtcacaccttcgggaacgtggttgacctacacaggtgccatcaaattggatgacaaagatccaaatttcaaagatcaagtcattttgctgaataagcatattgacgcatacaaaacattcccaccaacagagcctaaaaaggacaaaaagaagaaggctgatgaaactcaagccttaccgcagagacagaagaaacagcaaactgtgactcttcttcctgctgcagatttggatgatttctccaaacaattgcaacaatccatgagcagtgctgactcaactcaggcctaaactcatgcagaccacacaaggcagatgggctatataaacgttttcgcttttccgtttacgatatatagtctactcttgtgcagaatgaattctcgtaactacatagcacaagtagatgtagttaactttaatctcacatagcaatctttaatcagtgtgtaacattagggaggacttgaaagagccaccacattttcaccgaggccacgcggagtacgatcgagtgtacagtgaacaatgctagggagagctgcctatatggaagagccctaatgtgtaaaattaattttagtagtgctatccccatgtgattttaatagcttcttaggagaa

SEQ ID NO: 293 - DNA, 29859 bp, Artificial Sequence
  SARS-CoV-2 isolate ITA/ABR-IZSGC-TE30968/2021
attaaaggtttataccttcccaggtaacaaaccaaccaactttcgatctcttgtagatctgttctctaaacgaactttaaaatctgtgtggctgtcactcggctgcatgcttagtgcactcacgcagtataattaataactaattactgtcgttgacaggacacgagtaactcgtctatcttctgcaggctgcttacggtttcgtccgtgttgcagccgatcatcagcacatctaggttttgtccgggtgtgaccgaaaggtaagatggagagccttgtccctggtttcaacgagaaaacacacgtccaactcagtttgcctgttttacaggttcgcgacgtgctcgtacgtggctttggagactccgtggaggaggtcttatcagaggcacgtcaacatcttaaagatggcacttgtggcttagtagaagttgaaaaaggcgttttgcctcaacttgaacagccctatgtgttcatcaaacgttcggatgctcgaactgcacctcatggtcatgttatggttgagctggtagcagaactcgaaggcattcagtacggtcgtagtggtgagacacttggtgtccttgtccctcatgtgggcgaaataccagtggcttaccgcaaggttcttcttcgtaagaacggtaataaaggagctggtggccatagttacggcgccgatctaaagtcatttgacttaggcgacgagcttggcactgatccttatgaagactttcaagaaaactggaacactaaacatagcagtggtgttacccgtgaactcatgcgtgagcttaacggaggggcatacactcgctatgtcgataacaacttctgtggccctgatggctaccctcttgagtgcattaaagaccttctagcacgtgctggtaaagcttcatgcactttgtccgaacaactggactttattgacactaagaggggtgtatactgctgccgtgaacatgagcatgaaattgcttggtacacggaacgttctgaaaagagctatgaattgcagacaccttttgaaattaaattggcaaagaaatttgacaccttcaatggggaatgtccaaattttgtatttcccttaaattccataatcaagactattcaaccaagggttgaaaagaaaaagcttgatggctttatgggtagaattcgatctgtctatccagttgcgtcaccaaatgaatgcaaccaaatgtgcctttcaactctcatgaagtgtgatcattgtggtgaaacttcatggcagacgggcgattttgttaaagccacttgcgaattttgtggcactgagaatttgactaaagaaggtgccactacttgtggttacttaccccaaaatgctgttgttaaaatttattgtccagcatgtcacaattcagaagtaggacctgagcatagtcttgccgaataccataatgaatctggcttgaaaaccattcttcgtaagggtggtcgcactattgcctttggaggctgtgtgttctcttatgttggttgccataacaagtgtgcctattgggttccacgtgctagcgctaacataggttgtaaccatacaggtgttgttggagaaggttccgaaggtcttaatgacaaccttcttgaaatactccaaaaagagaaagtcaacatcaatattgttggtgactttaaacttaatgaagagatcgccattattttggcatctttttctgcttccacaagtgcttttgtggaaactgtgaaaggtttggattataaagcattcaaacaaattgttgaatcctgtggtaattttaaagttacaaaaggaaaagctaaaaaaggtgcctggaatattggtgaacagaaatcaatactgagtcctctttatgcatttgcatcagaggctgctcgtgttgtacgatcaattttctcccgcactcttgaaactgctcaaaattctgtgcgtgttttacagaaggccgctataacaatactagatggaatttcacagtattcactgagactcattgatgctatgatgttcacatctgatttggctactaacaatctagttgtaatggcctacattacaggtggtgttgttcagttgacttcgcagtggctaactaacatctttggcactgtttatgaaaaactcaaacccgtccttgattggcttgaagagaagtttaaggaaggtgtagagtttcttagagacggttgggaaattgttaaatttatctcaacctgtgcttgtgaaattgtcggtggacaaattgtcacctgtgcaaaggaaattaaggagagtgttcagacattctttaagcttgtaaataaatttttggctttgtgtgctgactctatcattattggtggagctaaacttaaagccttgaatttaggtgaaacatttgtcacgcactcaaagggattgtacagaaagtgtgttaaatccagagaagaaactggcctactcatgcctctaaaagccccaaaagaaattatcttcttagagggagaaacacttcccacagaagtgttaacagaggaagttgtcttgaaaactggtgatttacaaccattagaacaacctactagtgaagctgttgaagctccattggttggtacaccagtttgtattaacgggcttatgttgctcgaaatcaaagacacagaaaagtactgtgcccttgcacctaatatgatggtaacaaacaataccttcacactcaaaggcggtgcaccaacaaaggttacttttggtgatgatactgtgatagaagtgcaaggttacaagagtgtgaatatcacttttgaacttgatgaaaggattgataaagtacttaatgagaagtgctctgcctatacagttgaactcggtacagaagtaaatgagttcgcctgtgttgtggcagatgctgtcataaaaactttgcaaccagtatctgaattacttacaccactgggcattgatttagatgagtggagtatggctacatactacttatttgatgagtctggtgagtttaaattggcttcacatatgtattgttctttttaccctccagatgaggatgaagaagaaggtgattgtgaagaagaagagtttgagccatcaactcaatatgagtatggtattgaagatgattaccaaggtaaacctttggaatttggtgccacttctgctgctcttcaacctgaagaagagcaagaagaagattggttagatgatgatagtcaacaaactgttggtcaacaagacggcagtgaggacaatcagacaactactattcaaacaattgttgaggttcaacctcaattagagatggaacttacaccagttgttcagactattgaagtgaatagttttagtggttatttaaaacttactgacaatgtatacattaaaaatgcagacattgtggaagaagctaaaaaggtaaaaccaacagtggttgttaatgcagccaatgtttaccttaaacatggaggaggtgttgcaggagccttaaataaggctactaacaatgccatgcaagttgaatctgatgattacatagctactaatggaccacttaaagtgggtggtagttgtgttttaagcggacacaatcttgctaaacactgtcttcatgttgtcggcccaaatgttaacaaaggtgaagacattcaacttcttaagagtgcttatgaaaattttaatcagcacgaagttctacttgcaccattattatcagctggtatttttggtgctgaccctatacattctttaagagtttgtgtagatactgttcgcacaaatgtctacttagctgtctttgataaaaatctctatgacaaacttgttttaagctttttggaaatgaagagtgaaaagcaagttgaacaaaagatcgctgagattcctaaagaggaagttaagccatttataactgaaagtaaaccttcagttgaacagagaaaacaagatgataagaaaatcaaagcttgtgttgaagaagttacaacaactctggaagaaactaagttcctcacagaaaacttgttactttatattgacattaatggcaatcttcatccagattctgccactcttgttagtgacattgacatcactttcttaaagaaagatgctccatatatagtgggtgatgttgttcaagagggtgttttaactgctgtggttatacctactaaaaaggctggtggcactactgaaatgctagcgaaagctttgagaaaagtgccaacagacaattatataaccacttacccgggtcagggtttaaatggttacactgtagaggaggcaaagacagtgcttaaaaagtgtaaaagtgccttttacattctaccatctattatctctaatgagaagcaagaaattcttggaactgtttcttggaatttgcgagaaatgcttgcacatgcagaagaaacacgcaaattaatgcctgtctgtgtggaaactaaagccatagtttcaactatacagcgtaaatataagggtattaaaatacaagagggtgtggttgattatggtgctagattttacttttacaccagtaaaacaactgtagcgtcacttatcaacacacttaacgatctaaatgaaactcttgttacaatgccacttggctatgtaacacatggcttaaatttggaagaagctgctcggtatatgagatctctcaaagtgccagctacagtttctgtttcttcacctgatgctgttacagcgtataatggttatcttacttcttcttctaaaacacctgaagaacattttattgaaaccatctcacttgctggttcctataaagattggtcctattctggacaatctacacaactaggtatagaatttcttaagagaggtgataaaagtgtatattacactagtaatcctaccacattccacctagatggtgaagttatcacctttgacaatcttaagacacttctttctttgagagaagtgaggactattaaggtgtttacaacagtagacaacattaacctccacacgcaagttgtggacatgtcaatgacatatggacaacagtttggtccaacttatttggatggagctgatgttactaaaataaaacctcataattcacatgaaggtaaaacattttatgttttacctaatgatgacactctacgtgttgaggcttttgagtactaccacacaactgatcctagttttctgggtaggtacatgtcagcattaaatcacactaaaaagtggaaatacccacaagttaatggtttaacttctattaaatgggcagataacaactgttatcttgccactgcattgttaacactccaacaaatagagttgaagtttaatccacctgctctacaagatgcttattacagagcaagggctggtgaagctgctaacttttgtgcacttatcttagcctactgtaataagacagtaggtgagttaggtgatgttagagaaacaatgagttacttgtttcaacatgccaatttagattcttgcaaaagagtcttgaacgtggtgtgtaaaacttgtggacaacagcagacaacccttaagggtgtagaagctgttatgtacatgggcacactttcttatgaacaatttaagaaaggtgttcagataccttgtacgtgtggtaaacaagctacacaatatctagtacaacaggagtcaccttttgttatgatgtcagcaccacctgctcagtatgaacttaagcatggtacatttacttgtgctagtgagtacactggtaattaccagtgtggtcactataaacatataacttctaaagaaactttgtattgcatagacggtgctttacttacaaagtcctcagaatacaaaggtcctattacggatgttttctacaaagaaaacagttacacaacaaccataaaaccagttacttataaattggatggtgttgtttgtacagaaattgaccctaagttggacaattattataagaaagacaattcttatttcacagagcaaccaattgatcttgtaccaaaccaaccatatccaaacgcaagcttcgataattttaagtttgtatgtgataatatcaaatttgctgatgatttaaaccagttaactggttataagaaacctgcttcaagagagcttaaagttacatttttccctgacttaaatggtgatgtggtggctattgattataaacactacacaccctcttttaagaaaggagctaaattgttacataaacctattgtttggcatgttaacaatgcaactaataaagccacgtataaaccaaatacctggtgtatacgttgtctttggagcacaaaaccggttgaaacatcaaattcgtttgatgtactgaagtcagaggacgcgcagggaatggataatcttgcctgcgaagatctaaaaccagtctctgaagaagtagtggaaaatcctaccatacagaaagacgttcttgagtgtaatgtgaaaactaccgaagttgtaggagacattatacttaaaccagcaaataatagtttaaaaattacagaagaggttggccacacagatctaatggctgcttatgtagacaattctagtcttactattaagaaacctaatgaattatctagagtgttaggtttgaaaacccttgctactcatggtttagctgctgttaatagtgtcccttgggatactatagctaattatgctaagccttttcttaacaaagttgttagtacaactactaacatagttacacggtgtttaaaccgtgtttgtactaattatatgccttatttctttactttattgctacaattgtgtacttttactagaagtacaaattctagaattaaagcatctatgccgactactatagcaaagaatactgttaagagtgtcggtaaattttgtctagaggcttcatttaattatttgaagtcacctaatttttctaaactgataaatattataatttggtttttactattaagtgtttgcctaggttctttaatctactcaaccgctgctttaggtgttttaatgtctaatttaggcatgccttcttactgtactggttacagagaaggctatttgaactctactaatgtcactattgcaacctactgtactggttctataccttgtagtgtttgtcttagtggtttagattctttagacacctatccttctttagaaactatacaaattaccatttcatcttttaaatgggatttaactgcttttggcttagttgcagagtggtttttggcatatattcttttcactaggtttttctatgtacttggattggctgcaatcatgcaattgtttttcagctattttgcagtacattttattagtaattcttggcttatgtggttaataattaatcttgtacaaatggccccgatttcagctatggttagaatgtacatcttctttgcatcattttattatgtatggaaaagttatgtgcatgttgtagacggttgtaattcatcaacttgtatgatgtgttacaaacgtaatagagcaacaagagtcgaatgtacaactattgttaatggtgttagaaggtccttttatgtctatgctaatggaggtaaaggcttttgcaaactacacaattggaattgtgttaattgtgatacattctgtgctggtagtacatttattagtgatgaagttgcgagagacttgtcactacagtttaaaagaccaataaatcctactgaccagtcttcttacatcgttgatagtgttacagtgaagaatggttccatccatctttactttgataaagctggtcaaaagacttatgaaagacattctctctctcattttgttaacttagacaacctgagagctaataacactaaaggttcattgcctattaatgttatagtttttgatggtaaatcaaaatgtgaagaatcatctgcaaaatcagcgtctgtttactacagtcagcttatgtgtcaacctatactgttactagatcaggcattagtgtctgatgttggtgatagtgcggaagttgcagttaaaatgtttgatgcttacgttaatacgttttcatcaacttttaacgtaccaatggaaaaactcaaaacactagttgcaactgcagaagctgaacttgcaaagaatgtgtccttagacaatgtcttatctacttttatttcagcagctcggcaagggtttgttgattcagatgtagaaactaaagatgttgttgaatgtcttaaattgtcacatcaatctgacatagaagttactggcgatagttgtaataactatatgctcacctataacaaagttgaaaacatgacaccccgtgaccttggtgcttgtattgactgtagtgcgcgtcatattaatgcgcaggtagcaaaaagtcacaacattgctttgatatggaacgttaaagatttcatgtcattgtctgaacaactacgaaaacaaatacgtagtgctgctaaaaagaataacttaccttttaagttgacatgtgcaactactagacaagttgttaatgttgtaacaacaaagatagcacttaagggtggtaaaattgttaataattggttgaagcagttaattaaagttacacttgtgttcctttttgttgctgctattttctatttaataacacctgttcatgtcatgtctaaacatactgacttttcaagtgaaatcataggatacaaggctattgatggtggtgtcactcgtgacatagcatctacagatacttgttttgctaacaaacatgctgattttgacacatggtttagccagcgtggtggtagttatactaatgacaaagcttgcccattgattgctgcagtcataacaagagaagtgggttttgtcgtgcctggtttgcctggcacgatattacgcacaactaatggtgactttttgcatttcttacctagagtttttagtgcagttggtaacatctgttacacaccatcaaaacttatagagtacactgactttgcaacatcagcttgtgttttggctgctgaatgtacaatttttaaagatgcttctggtaagccagtaccatattgttatgataccaatgtactagaaggttctgttgcttatgaaagtttacgccctgacacacgttatgtgctcatggatggctctattattcaatttcctaacacctaccttgaaggttctgttagagtggtaacaacttttgattctgagtactgtaggcacggcacttgtgaaagatcagaagctggtgtttgtgtatctactagtggtagatgggtacttaacaatgattattacagatctttaccaggagttttctgtggtgtagatgctgtaaatttacttactaatatgtttacaccactaattcaacctattggtgctttggacatatcagcatctatagtagctggtggtattgtagctatcgtagtaacatgccttgcctactattttatgaggtttagaagagcttttggtgaatacagtcatgtagttgcctttaatactttactattccttatgtcattcactgtactctgtttaacaccagtttactcattcttacctggtgtttattctgttatttacttgtacttgacattttatcttactaatgatgtttcttttttagcacatattcagtggatggttatgttcacacctttagtacctttctggataacaattgcttatatcatttgtatttccacaaagcatttctattggttctttagtaattacctaaagagacgtgtagtctttaatggtgtttcctttagtacttttgaagaagctgcgctgtgcacctttttgttaaataaagaaatgtatctaaagttgcgtagtgatgtgctattacctcttacgcaatataatagatacttagctctttataataagtacaagtattttagtggagcaatggatacaactagctacagagaagctgcttgttgtcatctcgcaaaggctctcaatgacttcagtaactcaggttctgatgttctttaccaaccaccacaaacctctatcacctcagctgttttgcagagtggttttagaaaaatggcattcccatctggtaaagttgagggttgtatggtacaagtaacttgtggtacaactacacttaacggtctttggcttgatgacgtagtttactgtccaagacatgtgatctgcacctctgaagacatgcttaaccctaattatgaagatttactcattcgtaagtctaatcataatttcttggtacaggctggtaatgttcaactcagggttattggacattctatgcaaaattgtgtacttaagcttaaggttgatacagccaatcctaagacacctaagtataagtttgttcgcattcaaccaggacagactttttcagtgttagcttgttacaatggttcaccatctggtgtttaccaatgtgctatgaggcccaatttcactattaagggttcattccttaatggttcatgtggtagtgttggttttaacatagattatgactgtgtctctttttgttacatgcaccatatggaattaccaactggagttcatgctggcacagacttagaaggtaacttttatggaccttttgttgacaggcaaacagcacaagcagctggtacggacacaactattacagttaatgttttagcttggttgtacgctgctgttataaatggagacaggtggtttctcaatcgatttaccacaactcttaatgactttaaccttgtggctatgaagtacaattatgaacctctaacacaagaccatgttgacatactaggacctctttctgctcaaactggaattgccgttttagatatgtgtgcttcattaaaagaattactgcaaaatggtatgaatggacgtaccatattgggtagtgctttattagaagatgaatttacaccttttgatgttgttagacaatgctcaggtgttactttccaaagtgcagtgaaaagaacaatcaagggtacacaccactggttgttactcacaattttgacttcacttttagttttagtccagagtactcaatggtctttgttcttttttttgtatgaaaatgcctttttaccttttgctatgggtattattgctatgtctgcttttgcaatgatgtttgtcaaacataagcatgcatttctctgtttgtttttgttaccttctcttgccactgtagcttattttaatatggtctatatgcctgctagttgggtgatgcgtattatgacatggttggatatggttgatactagtttgaagctaaaagactgtgttatgtatgcatcagctgtagtgttactaatccttatgacagcaagaactgtgtatgatgatggtgctaggagagtgtggacacttatgaatgtcttgacactcgtttataaagtttattatggtaatgctttagatcaagccatttccatgtgggctcttataatctctgttacttctaactactcaggtgtagttacaactgtcatgtttttggccagaggtattgtttttatgtgtgttgagtattgccctattttcttcataactggtaatacacttcagtgtataatgctagtttattgtttcttaggctatttttgtacttgttactttggcctcttttgtttactcaaccgctactttagactgactcttggtgtttatgattacttagtttctacacaggagtttagatatatgaattcacagggactactcccacccaagaatagcatagatgccttcaaactcaacattaaattgttgggtgttggtggcaaaccttgtatcaaagtagccactgtacagtctaaaatgtcagatgtaaagtgcacatcagtagtcttactctcagttttgcaacaactcagagtagaatcatcatctaaattgtgggctcaatgtgtccagttacacaatgacattctcttagctaaagatactactgaagcctttgaaaaaatggtttcactactttctgttttgctttccatgcagggtgctgtagacataaacaagctttgtgaagaaatgctggacaacagggcaaccttacaagctatagcctcagagtttagttcccttccatcatatgcagcttttgctactgctcaagaagcttatgagcaggctgttgctaatggtgattctgaagttgttcttaaaaagttgaagaagtctttgaatgtggctaaatctgaatttgaccgtgatgcagccatgcaacgtaagttggaaaagatggctgatcaagctatgacccaaatgtataaacaggctagatctgaggacaagagggcaaaagttactagtgctatgcagacaatgcttttcactatgcttagaaagttggataatgatgcactcaacaacattatcaacaatgcaagagatggttgtgttcccttgaacataatacctcttacaacagcagccaaactaatggttgtcataccagactataacacatataaaaatacgtgtgatggtacaacatttacttatgcatcagcattgtgggaaatccaacaggttgtagatgcagatagtaaaattgttcaacttagtgaaattagtatggacaattcacctaatttagcatggcctcttattgtaacagctttaagggccaattctgctgtcaaattacagaataatgagcttagtcctgttgcactacgacagatgtcttgtgctgccggtactacacaaactgcttgcactgatgacaatgcgttagcttattacaacacaacaaagggaggtaggtttgtacttgcactgttatccgatttacaggatttgaaatgggctagattccctaagagtgatggaactggtactatctatacagaactggaaccaccttgtaggtttgttacagacacacctaaaggtcctaaagtgaagtatttatactttattaaaggattaaacaacctaaatagaggtatggtacttggtagtttagctgccacagtacgtctacaagctggtaatgcaacagaagtgcctgccaattcaactgtattatctttctgtgcttttgctgtagatgctgctaaagcttacaaagattatctagctagtgggggacaaccaatcactaattgtgttaagatgttgtgtacacacactggtactggtcaggcaataacagttacaccggaagccaatatggatcaagaatcctttggtggtgcatcgtgttgtctgtactgccgttgccacatagatcatccaaatcctaaaggattttgtgacttaaaaggtaagtatgtacaaatacctacaacttgtgctaatgaccctgtgggttttacacttaaaaacacagtctgtaccgtctgcggtatgtggaaaggttatggctgtagttgtgatcaactccgcgaacccatgcttcagtcagctgatgcacaatcgtttttaaacgggtttgcggtgtaagtgcagcccgtcttacaccgtgcggcacaggcactagtactgatgtcgtatacagggcttttgacatctacaatgataaagtagctggttttgctaaattcctaaaaactaattgttgtcgcttccaagaaaaggacgaagatgacaatttaattgattcttactttgtagttaagagacacactttctctaactaccaacatgaagaaacaatttataatttacttaaggattgtccagctgttgctaaacatgacttctttaagtttagaatagacggtgacatggtaccacatatatcacgtcaacgtcttactaaatacacaatggcagacctcgtctatgctttaaggcattttgatgaaggtaattgtgatacattaaaagaaatacttgtcacatacaattgttgtgatgatgattatttcaataaaaaggactggtatgattttgtagaaaacccagatatattacgcgtatacgccaacttaggtgaacgtgtacgccaagctttgttaaaaacagtacaattctgtgatgccatgcgaaatgctggtattgttggtgtactgacattagataatcaagatctcaatggtaactggtatgatttcggtgatttcatacaaaccacgccaggtagtggagttcctgttgtagattcttattattcattgttaatgcctatattaaccttgaccagggctttaactgcagagtcacatgttgacactgacttaacaaagccttacattaagtgggatttgttaaaatatgacttcacggaagagaggttaaaactctttgaccgttattttaaatattgggatcagacataccacccaaattgtgttaactgtttggatgacagatgcattctgcattgtgcaaactttaatgttttattctctacagtgttcccacttacaagttttggaccactagtgagaaaaatatttgttgatggtgttccatttgtagtttcaactggataccacttcagagagctaggtgttgtacataatcaggatgtaaacttacatagctctagacttagttttaaggaattacttgtgtatgctgctgaccctgctatgcacgctgcttctggtaatctattactagataaacgcactacgtgcttttcagtagctgcacttactaacaatgttgcttttcaaactgtcaaacccggtaattttaacaaagacttctatgactttgctgtgtctaagggtttctttaaggaaggaagttctgttgaattaaaacacttcttctttgctcaggatggtaatgctgctatcagcgattatgactactatcgttataatctaccaacaatgtgtgatatcagacaactactatttgtagttgaagttgttgataagtactttgattgttacgatggtggctgtattaatgctaaccaagtcatcgtcaacaacctagacaaatcagctggttttccatttaataaatggggtaaggctagactttattatgattcaatgagttatgaggatcaagatgcacttttcgcatatacaaaacgtaatgtcatccctactataactcaaatgaatcttaagtatgccattagtgcaaagaatagagctcgcaccgtagctggtgtctctatctgtagtactatgaccaatagacagtttcatcaaaaattattgaaatcaatagccgccactagaggagctactgtagtaattggaacaagcaaattctatggtggttggcacaacatgttaaaaactgtttatagtgatgtagaaaaccctcaccttatgggttgggattatcctaaatgtgatagagccatgcctaacatgcttagaattatggcctcacttgttcttgctcgcaaacatacaacgtgttgtagcttgtcacaccgtttctatagattagctaatgagtgtgctcaagtattgagtgaaatggtcatgtgtggcggttcactatatgttaaaccaggtggaacctcatcaggagatgccacaactgcttatgctaatagtgtttttaacatttgtcaagctgtcacggccaatgttaatgcacttttatctactgatggtaacaaaattgccgataagtatgtccgcaatttacaacacagactttatgagtgtctctatagaaatagagatgttgacacagactttgtgaatgagttttacgcatatttgcgtaaacatttctcaatgatgatactctctgacgatgctgttgtgtgtttcaatagcacttatgcatctcaaggtctagtggctagcataaagaactttaagtcagttctttattatcaaaacaatgtttttatgtctgaagcaaaatgttggactgagactgaccttactaaaggacctcatgaattttgctctcaacatacaatgctagttaaacagggtgatgattatgtgtaccttccttacccagatccatcaagaatcctaggggccggctgttttgtagatgatatcgtaaaaacagatggtacacttatgattgaacggttcgtgtctttagctatagatgcttacccacttactaaacatcctaatcaggagtatgctgatgtctttcatttgtacttacaatacataagaaagctacatgatgagttaacaggacacatgttagacatgtattctgttatgcttactaatgataacacttcaaggtattgggaacctgagttttatgaggctatgtacacaccgcatacagtcttacaggctgttggggcttgtgttctttgcaattcacagacttcattaagatgtggtgcttgcatacgtagaccattcttatgttgtaaatgctgttacgaccatgtcatatcaacatcacataaattagtcttgtctgttaatccgtatgtttgcaatgctccaggttgtgatgtcacagatgtgactcaactttacttaggaggtatgagctattattgtaaatcacataaaccacccattagttttccattgtgtgctaatggacaagtttttggtttatataaaaatacatgtgttggtagcgataatgttactgactttaatgcaattgcaacatgtgactggacaaatgctggtgattacattttagctaacacctgtactgaaagactcaagctttttgcagcagaaacgctcaaagctactgaggagacatttaaactgtcttatggtattgctactgtacgtgaagtgctgtctgacagagaattacatctttcatgggaagttggtaaacctagaccaccacttaaccgaaattatgtctttactggttatcgtgtaactaaaaacagtaaagtacaaataggagagtacacctttgaaaaaggtgactatggtgatgctgttgtttaccgaggtacaacaacttacaaattaaatgttggtgattattttgtgctgacatcacatacagtaatgccattaagtgcacctacactagtgccacaagagcactatgttagaattactggcttatacccaacactcaatatctcagatgagttttctagcaatgttgcaaattatcaaaaggttggtatgcaaaagtattctacactccagggaccacctggtactggtaagagtcattttgctattggcctagctctctactacccttctgctcgcatagtgtatacagcttgctctcatgccgctgttgatgcactatgtgagaaggcattaaaatatttgcctatagataaatgtagtagaattatacctgcacgtgctcgtgtagattgttttgataaattcaaagtgaattcaacattagaacagtatgtcttttgtactgtaaatgcattgcctgagacgacagcagatatagttgtctttgatgaaatttcaatggccacaaattatgatttgagtgttgtcaatgccagattacgtgctaagcactatgtgtacattggcgaccctgctcaattacctgcaccacgcacattgctaactaagggcacactagaaccagaatatttcaattcagtgtgtagacttatgaaaactataggtccagacatgttcctcggaacttgtcggcgttgtcctgctgaaattgttgacactgtgagtgctttggtttatgataataagcttaaagcacataaagacaaatcagctcaatgctttaaaatgttttataagggtgttatcacgcatgatgtttcatctgcaattaacaggccacaaataggcgtggtaagagaattccttacacgtaaccctgcttggagaaaagctgtctttatttcaccttataattcacagaatgctgtagcctcaaagattttgggactaccaactcaaactgttgattcatcacagggctcagaatatgactatgtcatattcactcaaaccactgaaacagctcactcttgtaatgtaaacagatttaatgttgctattaccagagcaaaagtaggcatactttgcataatgtctgatagagacctttatgacaagttgcaatttacaagtcttgaaattccacgtaggaatgtggcaactttacaagctgaaaatgtaacaggactctttaaagattgtagtaaggtaatcactgggttacatcctacacaggcacctacacacctcagtgttgacactaaattcaaaactgaaggtttatgtgttgacatacctggcatacctaaggacatgacctatagaagactcatctctatgatgggttttaaaatgaattatcaagttaatggttaccctaacatgtttatcacccgcgaagaagctataagacatgtacgtgcatggattggcttcgatgtcgaggggtgtcatgctactagagaagctgttggtaccaatttacctttacagctaggtttttctacaggtgttaacctagttgctgtacctacaggttatgttgatacacctaataatacagatttttccagagttagtgctaaaccaccgcctggagatcaatttaaacacctcataccacttatgtacaaaggacttccttggaatgtagtgcgtataaagattgtacaaatgttaagtgacacacttaaaaatctctctgacagagtcgtatttgtcttatgggcacatggctttgagttgacatctatgaagtattttgtgaaaataggacctgagcgcacctgttgtctatgtgatagacgtgccacatgcttttccactgcttcagacacttatgcctgttggcatcattctattggatttgattacgtctataatccgtttatgattgatgttcaacaatggggttttacaggtaacctacaaagcaaccatgatctgtattgtcaagtccatggtaatgcacatgtagctagttgtgatgcaatcatgactaggtgtctagctgtccacgagtgctttgttaagcgtgttgactggactattgaatatcctataattggtgatgagctgaagattaatgcggcttgtagaaaggttcaacacatggttgttaaagctgcattattagcagacaaattcccagttcttcacgacattggtaaccctaaagctattaagtgtgtacctcaagctgatgtagaatggaagttctatgatgcacagccttgtagtgacaaagcttataaaatagaagaattattctattcttatgccacacattctgacaaattcacagatggtgtatgcctattttggaattgcaatgtcgatagatatcctgctaattccattgtttgtagatttgacactagagtgctatctaaccttaacttgcctggttgtgatggtggcagtttgtatgtaaataaacatgcattccacacaccagcttttgataaaagtgcttttgttaatttaaaacaattaccatttttctattactctgacagtccatgtgagtctcatggaaaacaagtagtgtcagatatagattatgtaccactaaagtctgctacgtgtataacacgttgcaatttaggtggtgctgtctgtagacatcatgctaatgagtacagattgtatctcgatgcttataacatgatgatctcagctggctttagcttgtgggtttacaaacaatttgatacttataacctctggaacacttttacaagacttcagagtttagaaaatgtggcttttaatgttgtaaataagggacactttgatggacaacagggtgaagtaccagtttctatcattaataacactgtttacacaaaagttgatggtgttgatgtagaattgtttgaaaataaaacaacattacctgttaatgtagcatttgagctttgggctaagcgcaacattaaaccagtmccagaggtgaaaatactcaataatttgggtgtggacattgctgctaatactgtgatctgggactacaaaagagatgctccagcacatatatctactattggtgtttgttctatgactgacatagccaagaaaccaactgaaacgatttgtgcaccactcactgtcttttttgatggtagagttgatggtcaagtagacttatttagaaatgcccgtaatggtgttcttattacagaaggtagtgttaaaggtttacaaccatctgtaggtcccaaacaagctagtcttaatggagtcacattaattggagaagccgtaaaaacacagttcaattattataagaaagttgatggtgttgtccaacaattacctgaaacttactttactcagagtagaaatttacaagaatttaaacccaggagtcaaatggaaattgatttcttagaattagctatggatgaattcattgaacggtataaattagaaggctatgccttcgaacatatcgtttatggagattttagtcatagtcagttaggtggtttacatctactgattggactagctaaacgttttaaggaatcaccttttgaattagaagattttattcctatggacagtacagttaaaaactatttcataacagatgcgcaaacaggttcatctaagtgtgtgtgttctgttattgatttattacttgatgattttgttgaaataataaaatcccaagatttatctgtagtttctaaggttgtcaaagtgactattgactatacagaaatttcatttatgctttggtgtaaagatggccatgtagaaacattttacccaaaattacaatctagtcaagcgtggcaaccgggtgttgctatgcctaatctttacaaaatgcaaagaatgctattagaaaagtgtgaccttcaaaattatggtgatagtgcaacattacctaaaggcataatgatgaatgtcgcaaaatatactcaactgtgtcaatatttaaacacattaacattagctgtaccctataatatgagagttatacattttggtgctggttctgataaaggagttgcaccaggtacagctgttttaagacagtggttgcctacgggtacgctgcttgtcgattcagatcttaatgactttgtctctgatgcagattcaactttgattggtgattgtgcaactgtacatacagctaataaatgggatctcattattagtgatatgtacgaccctaagactaaaaatgttacaaaagaaaatgactctaaagagggttttttcacttacatttgtgggtttatacaacaaaagctagctcttggaggttccgtggctataaagataacagaacattcttggaatgctgatctttataagctcatgggacacttcgcatggtggacagcctttgttactaatgtgaatgcgtcatcatctgaagcatttttaattggatgtaattatcttggcaaaccacgcgaacaaatagatggttatgtcatgcatgcaaattacatattttggaggaatacaaatccaattcagttgtcttcctattctttatttgacatgagtaaatttccccttaaattaaggggtactgctgttatgtctttaaaagaaggtcaaatcaatgatatgattttatctcttcttagtaaaggtagacttataattagagaaaacaacagagttgttatttctagtgatgttcttgttaacaactaaacgaacaatgtttgtttttcttgttttattgccactagtctctagtcagtgtgttaattttacaaacagaactcaattaccctctgcatacactaattctttcacacgtggtgtttattaccctgacaaagttttcagatcctcagttttacattcaactcaggacttgttcttacctttcttttccaatgttacttggttccatgctatacatgtctctgggaccaatggtactaagaggtttgataaccctgtcctaccatttaatgatggtgtttattttgcttccactgagaagtctaacataataagaggctggatttttggtactactttagattcgaagacccagtccctacttattgttaataacgctactaatgttgttattaaagtctgtgaatttcaattttgtaattatccatttttgggtgtttattaccacaaaaacaacaaaagttggatggaaagtgagttcagagtttattctagtgcgaataattgcacttttgaatatgtctctcagccttttcttatggaccttgaaggaaaacagggtaatttcaaaaatcttagtgaatttgtgtttaagaatattgatggttattttaaaatatattctaagcacacgcctattaatttagtgcgtgatctccctcagggtttttcggctttagaaccattggtagatttgccaataggtattaacatcactaggtttcaaactttacttgctttacatagaagttatttgactcctggtgattcttcttcaggttggacagctggtgctgcagcttattatgtgggttatcttcaacctaggacttttctattaaaatataatgaaaatggaaccattacagatgctgtagactgtgcacttgaccctctctcagaaacaaagtgtacgttgaaatccttcactgtagaaaaaggaatctatcaaacttctaactttagagtccaaccaacagaatctattgttagatttcctaatattacaaacttgtgcccttttggtgaagtttttaacgccaccagatttgcatctgtttatgcttggaacaggaagagaatcagcaactgtgttgctgattattctgtcctatataattccgcatcattttccacttttaagtgttatggagtgtctcctactaaattaaatgatctctgctttactaatgtctatgcagattcatttgtaattagaggtgatgaagtcagacaaatcgctccagggcaaactggaacgattgctgattataattataaattaccagatgattttacaggctgcgttatagcttggaattctaacaatcttgattctaaggttggtggtaattataattacctgtatagattgtttaggaagtctaatctcaaaccttttgagagagatatttcaactgaaatctatcaggccggtagcacaccttgtaatggtgttaaaggttttaattgttactttcctttacaatcatatggtttccaacccacttatggtgttggttaccaaccatacagagtagtagtactttcttttgaacttctacatgcaccagcaactgtttgtggacctaaaaagtctactaatttggttaaaaacaaatgtgtcaatttcaacttcaatggtttaacaggcacaggtgttcttactgagtctaacaaaaagtttctgcctttccaacaatttggcagagacattgctgacactactgatgctgtccgtgatccacagacacttgagattcttgacattacaccatgttcttttggtggtgtcagtgttataacaccaggaacaaatacttctaaccaggttgctgttctttatcagggtgttaactgcacagaagtccctgttgctattcatgcagatcaacttactcctacttggcgtgtttattctacaggttctaatgtttttcaaacacgtgcaggctgtttaataggggctgaatatgtcaacaactcatatgagtgtgacatacccattggtgcaggtatatgcgctagttatcagactcagactaattctcctcggcgggcacgtagtgtagctagtcaatccatcattgcctacactatgtcacttggtgcagaaaattcagttgcttactctaataactctattgccatacccacaaattttactattagtgttaccacagaaattctaccagtgtctatgaccaagacatcagtagattgtacaatgtacatttgtggtgattcaactgaatgcagcaatcttttgttgcaatatggcagtttttgtacacaattaaaccgtgctttaactggaatagctgttgaacaagacaaaaacacccaagaagtttttgcacaagtcaaacaaatttacaaaacaccaccaattaaagattttggtggttttaatttttcacaaatattaccagatccatcaaaaccaagcaagaggtcatttattgaagatctacttttcaacaaagtgacacttgcagatgctggcttcatcaaacaatatggtgattgccttggtgatattgctgctagagacctcatttgtgcacaaaagtttaacggccttactgttttgccacctttgctcacagatgaaatgattgctcaatacacttctgcactgttagcgggtacaatcacttctggttggacctttggtgcaggtgctgcattacaaataccatttgctatgcaaatggcttataggtttaatggtattggagttacacagaatgttctctatgagaaccaaaaattgattgccaaccaatttaatagtgctattggcaaaattcaagactcactttcttccacagcaagtgcacttggaaaacttcaagatgtggtcaaccaaaatgcacaagctttaaacacgcttgttaaacaacttagctccaattttggtgcaatttcaagtgttttaaatgatatcctttcacgtcttgacaaagttgaggctgaagtgcaaattgataggttgatcacaggcagacttcaaagtttgcagacatatgtgactcaacaattaattagagctgcagaaatcagagcttctgctaatcttgctgctattaaaatgtcagagtgtgtacttggacaatcaaaaagagttgatttttgtggaaagggctatcatcttatgtccttccctcagtcagcacctcatggtgtagtcttcttgcatgtgacttatgtccctgcacaagaaaagaacttcacaactgctcctgccatttgtcatgatggaaaagcacactttcctcgtgaaggtgtctttgtttcaaatggcacacactggtttgtaacacaaaggaatttttatgaaccacaaatcattactacagacaacacatttgtgtctggtaactgtgatgttgtaataggaattgtcaacaacacagtttatgatcctttgcaacctgaattagactcattcaaggaggagttagataaatattttaagaatcatacatcaccagatgttgatttaggtgacatctctggcattaatgcttcatttgtaaacattcaaaaagaaattgaccgcctcaatgaggttgccaagaatttaaatgaatctctcatcgatctccaagaacttggaaagtatgagcagtatataaaatggccatggtacatttggctaggttttatagctggcttgattgccatagtaatggtgacaattatgctttgctgtatgaccagttgctgtagttgtctcaagggctgttgttcttgtggatcctgctgcaaatttgatgaagacgactctgagccagtgctcaaaggagtcaaattacattacacataaacgaacttatggatttgtttatgagaatcttcacaattggaactgtaactttgaagcaaggtgaaatcaaggatgctactccttcagattttgttcgcgctactgcaacgataccgatacaagcctcactccctttcggatggcttattgttggcgttgcacttcttgctgtttttcagagcgcttccaaaatcataaccctcaaaaagagatggcaactagcactctccaagggtgttcactttgtttgcaacttgctgttgttgtttgtaacagtttactcacaccttttgctcgttgctgctggccttgaagccccttttctctatctttatgctttagtctacttcttgcagagtataaactttgtaagaataataatgaggctttggctttgctggaaatgccgttccaaaaacccattactttatgatgccaactattttctttgctggcatactaattgttacgactattgtataccttacaatagtgtaacttcttcaattgtcattacttcaggtgatggcacaacaagtcctatttctgaacatgactaccagattggtggttatactgaaaaatgggaatctggagtaaaagactgtgttgtattacacagttactttacttcagactattaccagctgtactcaactcaattgagtacagacactggtgttgaacatgttaccttcttcatctacaataaaattgttgatgagcctgaagaacatgtccaaattcacacaatcgacggttcacccggagttgttaatccagtaatggaaccaatttatgatgaaccgacgacgactactagcgtgcctttgtaagcacaagctgatgagtacgaacttatgtactcattcgtttcggaagagacaggtacgttaatagttaatagcgtacttctttttcttgctttcgtggtattcttgctagttacactagccatccttactgcgcttcgattgtgtgcgtactgctgcaatattgttaacgtgagtcttgtaaaaccttctttttacgtttactctcgtgttaaaaatctgaattcttctagagttcctgatcttctggtctaaacgaactaaatattatattagtttttctgtttggaactttaattttagccatggcagattccaacggtactattaccgttgaagagcttaaaaagctccttgaacaatggaacctagtaataggtttcctattccttacatggatttgtcttctacaatttgcctatgccaacaggaataggtttttgtatataattaagttaattttcctctggctgttatggccagtaactttagcttgttttgtgcttgctgctgtttacagaataaattggatcaccggtggaattgctatcgcaatggcttgtcttgtaggcttgatgtggctcagctacttcattgcttctttcagactgtttgcgcgtacgcgttccatgtggtcattcaatccagaaactaacattcttctcaacgtgccactccatggcactattctgaccagaccgcttctagaaagtgaactcgtaatcggagctgtgatccttcgtggacatcttcgtattgctggacaccatctaggacgctgtgacatcaaggacctgcctaaagaaatcactgttgctacatcacgaacgctttcttattacaaattgggagcttcgcagcgtgtagcaggtgactcaggttttgctgcatacagtcgctacaggattggcaactataaattaaacacagaccattccagtagcagtgacaatattgctttgcttgtacagtaagtgacaacagatgtttcatctcgttgactttcaggttactatagcagagatattactaattattatgaggacttttaaagtttccatttggaatcttgattacatcataaacctcataattaaaaatttatctaagtcactaactgagaataaatattctcaattagatgaagagcaaccaatggagattgattaaacgaacatgaaaattattcttttcttggcactgataacactcgctacttgtgagctttatcactaccaagagtgtgttagaggtacaacagtacttttaaaagaaccttgctcttctggaacatacgagggcaattcaccatttcatcctctagctgataacaaatttgcactgacttgctttagcactcaatttgcttttgcttgtcctgacggcgtaaaacacgtctatcagttacgtgccagatcagtttcacctaaactgttcatcagacaagaggaagttcaagaactttactctccaatttttcttattgttgcggcaatagtgtttataacactttgcttcacactcaaaagaaagacagaatgattgaactttcattaattgacttctatttgtgctttttagcctttctgctattccttgttttaattatgcttattatcttttggttctcacttgaactgcaagatcataatgaaacttgtcacgcctaaacgaacatgaaatttcttgttttcttaggaatcatcacaactgtagctgcatttcaccaagaatgtagtttacagtcatgtactcaacatcaaccatatgtagttgatgacccgtgtcctattcacttctattctaaatggtatattagagtaggagctagaaaatcagcacctttaattgaattgtgcgtggatgaggctggttctaaatcacccattcagtacatcgatatcggtaattatacagtttcctgtttaccttttacaattaattgccagaaacctaaattgggtagtcttgtagtgcgttgttcgttctatgaagactttttagagtatcatgacgttcgtgttgttttagatttcatctaaacgaacaaacaaactaaaatgtctgataatggaccccaaaatcagcgaaatgcaccccgcattacgtttggtggaccctcagattcaactggcagtaaccagaatggagaacgcagtggggcgcgatcaaaacaacgtcggccccaaggtttacccaataatactgcgtcttggttcaccgctctcactcaacatggcaaggaagaccttaaattccctcgaggacaaggcgttccaattaacaccaatagcagtcgagatgaccaaattggctactaccgaagagctaccagacgaattcgtggtggtgacggtaaaatgaaagatctcagtccaagatggtatttctactacctaggaactgggccagaagctggacttccctatggtgctaacaaagacggcatcatatgggttgcaactgagggagccttgaatacaccaaaagatcacattggcacccgcaatcctgctaacaatgctgcaatcgtgctacaacttcctcaaggaacaacattgccaaaaggcttctacgctgaagggagcagaggcggcagtcaagcctcttctcgttcctcatcacgtagtcgcaacagttcaagaaattcaactccaggcagctctaaacgaacttctcctgctagaatggctggcaatggcggtgatgctgctcttgctttgctgctgcttgacagattgaaccagcttgagagcaaaatgtctggtaaaggccaacaacaacaaggccaaactgtcactaagaaatctgctgctgaggcttctaagaagcctcggcaaaaacgtactgccactaaagcatacaatgtaacacaagctttcggcagacgtggtccagaacaaacccaaggaaattttggggaccaggaactaatcagacaaggaactgattacaaacattggccgcaaattgcacaatttgcccccagcgcttcagcgttcttcggaatgtcgcgcattggcatggaagtcacaccttcgggaacgtggttgacctacacaggtgccatcaaattggatgacaaagatccaaatttcaaagatcaagtcattttgctgaataagcatattgacgcatacaaaacattcccaccaacagagcctaaaaaggacaaaaagaagaaggctgatgaaactcaagccttaccgcagagacagaagaaacagcaaactgtgactcttcttcctgctgcagatttggatgatttctccaaacaattgcaacaatccatgagcagtgctgactcaactcaggcctaaactcatgcagaccacacaaggcagatgggctatataaacgttttcgcttttccgtttacgatatatagtctactcttgtgcagaatgaattctcgtaactacatagcacaagtagatgtagttaactttaatctcacatagcaatctttaatcagtgtgtaacattagggaggacttgaaagagccaccacattttcaccgaggccacgcggagtacgatcgagtgtacagtgaacaatgctagggagagctgcctatatggaagagccctaatgtgtaaaattaattttagtagtgctaaccccatgtgattttaatagcttcttaggag

SEQ ID NO: 294 - DNA, 11155 bp, Artificial Sequence
  Zika virus isolate Pf13/251013-18
ctgtgtgaatcagactgcgacagttcgagtttgaagcgaaagctgcaacagttatcaacaggttttattttggatttggaaacgagagtttctggtcatgaaaaacccaaaaaagaaatccggaggattccggattgtcaatatgctaaaacgcggagtagcccgtgtgagcccctttgggggcttgaagaggctgccagccggacttctgctgggtcatgggcccatcaggatggtcttggcgattctagcctttttgagattcacggcaatcaagccatcactgggtctcatcaatagatggggttcagtggggaaaaaagaggctatggaaataataaagaagttcaagaaagatctggctgccatgctgagaataatcaatgctaggaaggagaagaagagacgaggcgcagatactagtgtcggaattgttggcctcctgctgaccacagctatggcagcggaggtcactagacgtgggagtgcatactatatgtacttggacagaaacgatgctggggaggccatatcttttccaaccacattggggatgaataagtgttatatacagatcatggatcttggacacatgtgtgatgccaccatgagctatgaatgccctatgctggatgagggggtggaaccagatgacgtcgattgttggtgcaacacgacgtcaacttgggttgtgtacggaacctgccatcacaaaaaaggtgaagcacggagatctagaagagctgtgacgctcccctcccattccactagaaagctgcaaacgcggtcgcaaacctggttggaatcaagagaatacacaaagcacttgattagagtcgaaaattggatattcaggaaccctggcttcgcgttagcagcagctgccatcgcttggcttttgggaagctcaacgagccaaaaagtcatatacttggtcatgatactgctgattgccccggcatacagcatcaggtgcataggagtcagcaatagggactttgtggaaggtatgtcaggtgggacttgggttgatgttgtcttggaacatggaggttgtgtcaccgtaatggcacaggacaaaccgactgtcgacatagagctggttacaacaacagtcagcaacatggcggaggtaagatcctactgctatgaggcatcaatatcagacatggcttcggacagccgctgcccaacacaaggtgaagcctaccttgacaagcaatcagacactcaatatgtctgcaaaagaacgttagtggacagaggctggggaaatggatgtggactttttggcaaagggagcctggtgacatgcgctaagtttgcatgctccaagaaaatgaccgggaagagcatccagccagagaatctggagtaccggataatgctgtcagttcatggctcccagcacagtgggatgatcgttaatgacacaggacatgaaactgatgagaatagagcgaaggttgagataacgcccaattcaccaagagccgaagccaccctggggggttttggaagcctaggacttgattgtgaaccgaggacaggccttgacttttcagatttgtattacttgactatgaataacaagcactggttggttcacaaggagtggttccacgacattccattaccttggcacgctggggcagacaccggaactccacactggaacaacaaagaagcactggtagagttcaaggacgcacatgccaaaaggcaaactgtcgtggttctagggagtcaagaaggagcagttcacacggcccttgctggagctctggaggctgagatggatggtgcaaagggaaggctgtcctctggccacttgaaatgtcgcctgaaaatggataaacttagattgaagggcgtgtcatactccttgtgtaccgcagcgttcacattcaccaagatcccggctgaaacactgcacgggacagtcacagtggaggtacagtacgcagggacagatggaccttgcaaggttccagctcagatggcggtggacatgcaaactctgaccccagttgggaggttgataaccgctaaccccgtaatcactgaaagcactgagaactctaagatgatgctggaacttgatccaccatttggggactcttacattgtcataggagtcggggagaagaagatcacccaccactggcacaggagtggcagcaccattggaaaagcatttgaagccactgtgagaggtgccaagagaatggcagtcttgggagacacagcctgggactttggatcagttggaggcgctctcaactcattgggcaagggcatccatcaaatttttggagcagctttcaaatcattgtttggaggaatgtcctggttctcacaaattctcattggaacgttgctgatgtggttgggtctgaacacaaagaatggatctatttcccttatgtgcttggccttagggggagtgttgatcttcttatccacagccgtctctgctgatgtggggtgctcggtggacttctcaaagaaggagacgagatgcggtacaggggtgttcgtctataacgacgttgaagcctggagggacaggtacaagtaccatcctgactccccccgtagattggcagcagcagtcaagcaagcctgggaagatggtatctgtgggatctcctctgtttcaagaatggaaaacatcatgtggagatcagtagaaggggagctcaacgcaatcctggaagagaatggagttcaactgacggtcgttgtgggatctgtaaaaaaccccatgtggagaggtccacagagattgcccgtgcctgtgaacgagctgccccacggctggaaggcttgggggaaatcgtacttcgtcagagcagcaaagacaaataacagctttgtcgtggatggtgacacactgaaggaatgcccactcaaacatagagcatggaacagctttcttgtggaggatcatgggttcggggtatttcacactagtgtctggctcaaggttagagaagattattcattagagtgtgatccagccgttattggaacagctgttaagggaaaggaggctgtacacagtgatctaggctactggattgagagtgagaagaatgacacatggaggctgaagagggcccatctgatcgagatgaaaacatgtgaatggccaaagtcccacacattgtggacagatggaatagaagagagtgatctgatcatacccaagtctttagctgggccactcagccatcacaataccagagagggctacaggacccaaatgaaagggccatggcacagtgaagagcttgaaattcggtttgaggaatgcccaggcactaaggtccacgtggaggaaacatgtggaacaagaggaccatctctgagatcaaccactgcaagcggaagggtgatcgaggaatggtgctgcagggagtgcacaatgcccccactgtcgttccgggctaaagatggctgttggtatggaatggagataaggcccaggaaagaaccagaaagtaacttagtaaggtcaatggtgactgcaggatcaactgatcacatggatcacttctcccttggagtgcttgtgattctgctcatggtgcaggaagggctgaagaagagaatgaccacaaagatcatcataagcacatcaatggcagtgctggtagctatgatcctgggaggattttcaatgagtgacctggctaagcttgcaattttgatgggtgccaccttcgcggaaatgaacactggaggagatgtagctcatctggcgctgatagcggcattcaaagtcagaccagcgttgctggtatctttcatcttcagagctaattggacaccccgtgaaagcatgctgctggccttggcctcgtgtcttttgcaaactgcgatctccgccttggaaggcgacctgatggttctcatcaatggttttgctttggcctggttggcaatacgagcgatggttgttccacgcactgataacatcaccttggcaatcctggctgctctgacaccactggcccggggcacactgcttgtggcgtggagagcaggccttgctacttgcggggggtttatgctcctctctctgaagggaaaaggcagtgtgaagaagaacttaccatttgtcatggccctgggactaaccgctgtgaggctggtcgaccccatcaacgtggtgggactgctgttgctcacaaggagtgggaagcggagctggccccctagcgaagtactcacagctgttggcctgatatgcgcattggctggagggttcgccaaggcagatatagagatggctgggcccatggccgcggtcggtctgctaattgtcagttacgtggtctcaggaaagagtgtggacatgtacattgaaagagcaggtgacatcacatgggaaaaagatgcggaagtcactggaaacagtccccggctcgatgtggcgctagatgagagtggtgatttctccctggtggaggatgacggtccccccatgagagagatcatactcaaggtggtcctgatgaccatctgtggcatgaacccaatagccataccctttgcagctggagcgtggtacgtatacgtgaagactggaaaaaggagtggtgctctatgggatgtgcctgctcccaaggaagtaaaaaagggggagaccacagatggagtgtacagagtaatgactcgtagactgctaggttcaacacaagttggagtgggagttatgcaagagggggtctttcacactatgtggcacgtcacaaaaggatccgcgctgagaagcggtgaagggagacttgatccatactggggagatgtcaagcaggatctggtgtcatactgtggtccatggaagctagatgccgcctgggacgggcacagcgaggtgcagctcttggccgtgccccccggagagagagcgaggaacatccagactctgcccggaatatttaagacaaaggatggggacattggagcggttgcgctggattacccagcaggaacttcaggatctccaatcctagacaagtgtgggagagtgataggactttatggcaatggggtcgtgatcaaaaatgggagttatgttagtgccatcacccaagggaggagggaggaagagactcctgttgagtgcttcgagccttcgatgctgaagaagaagcagctaactgtcttagacttgcatcctggagctgggaaaaccaggagagttcttcctgaaatagtccgtgaagccataaaaacaagactccgtactgtgatcttagctccaaccagggttgtcgctgctgaaatggaggaagcccttagagggcttccagtgcgttatatgacaacagcagtcaatgtcacccactctggaacagaaatcgtcgacttaatgtgccatgccaccttcacttcacgtctactacagccaatcagagtccctaactataatctgtatattatggatgaggcccacttcacagatccctcaagtatagcagcaagaggatacatttcaacaagggttgagatgggcgaggcggctgccatcttcatgaccgccacgccaccaggaacccgtgacgcatttccggactccaactcaccaattatggacaccgaagtggaagtcccagagagagcctggagctcaggctttgattgggtgacggatcattctggaaaaacagtttggtttgttccaagcgtgaggaacggcaatgagatcgcagcttgtctgacaaaggctggaaaacgggtcatacagctcagcagaaagacttttgagacagagttccagaaaacaaaacatcaagagtgggactttgtcgtgacaactgacatttcagagatgggcgccaactttaaagctgaccgtgtcatagattccaggagatgcctaaagccggtcatacttgatggcgagagagtcattctggctggacccatgcctgtcacacatgccagcgctgcccagaggagggggcgcataggcaggaatcccaacaaacctggagatgagtatctgtatggaggtgggtgcgcagagactgacgaagaccatgcacactggcttgaagcaagaatgctccttgacaatatttacctccaagatggcctcatagcctcgctctatcgacctgaggccgacaaagtagcagccattgagggagagttcaagcttaggacggagcaaaggaagacctttgtggaactcatgaaaagaggagatcttcctgtttggctggcctatcaggttgcatctgccggaataacctacacagatagaagatggtgctttgatggcacgaccaacaacaccataatggaagacagtgtgccggcagaggtgtggaccagacacggagagaaaagagtgctcaaaccgaggtggatggacgccagagtttgttcagatcatgcggccctgaagtcattcaaggagtttgccgctgggaaaagaggagcggcttttggagtgatggaagccctgggaacactgccaggacacatgacagagagattccaggaagccattgacaacctcgctgtgctcatgcgggcagagactggaagcaggccttacaaagccgcggcggcccaattgccggagaccctagagaccattatgcttttggggttgctgggaacagtctcgctgggaatctttttcgtcttgatgaggaacaagggcatagggaagatgggctttggaatggtgactcttggggccagcgcatggctcatgtggctctcggaaattgagccagccagaattgcatgtgtcctcattgttgtgttcctattgctggtggtgctcatacctgagccagaaaagcaaagatctccccaggacaaccaaatggcaatcatcatcatggtagcagtaggtcttctgggcttgattaccgccaatgaactcggatggttggagagaacaaagagtgacctaagccatctaatgggaaggagagaggagggggcaaccataggattctcaatggacattgacctgcggccagcctcagcttgggccatctatgctgccttgacaactttcattaccccagccgtccaacatgcagtgaccacttcatacaacaactactccttaatggcgatggccacgcaagctggagtgttgtttggtatgggcaaagggatgccattctacgcatgggactttggagtcccgctgctaatgataggttgctactcacaattaacacccctgaccctaatagtggccatcattttgctcgtggcgcactacatgtacttgatcccagggctgcaggcagcagctgcgcgtgctgcccagaagagaacggcagctggcatcatgaagaaccctgttgtggatggaatagtggtgactgacattgacacaatgacaattgacccccaagtggagaaaaagatgggacaggtgctactcatagcagtagccgtctccagcgccatactgtcgcggaccgcctgggggtggggggaggctggggccctgatcacagctgcaacttccactttgtgggaaggctctccgaacaagtactggaactcctctacagccacttcactgtgtaacatttttaggggaagttacttggctggagcttctctaatctacacagtaacaagaaacgctggcttggtcaagagacgtgggggtggaacaggagagaccctgggagagaaatggaaggcccgcttgaaccagatgtcggccctggagttctactcctacaaaaagtcaggcatcaccgaggtgtgcagagaagaggcccgccgcgccctcaaggacggtgtggcaacgggaggccatgctgtgtcccgaggaagtgcaaagctgagatggttggtggagcggggatacctgcagccctatggaaaggtcattgatcttggatgtggcagagggggctggagttactacgccgccaccatccgcaaagttcaagaagtgaaaggatacacaaaaggaggccctggtcatgaagaacccatgttggtgcaaagctatgggtggaacatagtccgtcttaagagtggggtggacgtctttcatatggcggctgagccgtgtgacacgttgctgtgtgacataggtgagtcatcatctagtcctgaagtggaagaagcacggacgctcagagtcctctccatggtgggggattggcttgaaaaaagaccaggagccttttgtataaaagtgttgtgcccatacaccagcactatgatggaaaccctggagcgactgcagcgtaggtatgggggaggactggtcagagtgccactctcccgcaactctacacatgagatgtactgggtctctggagcgaaaagcaacaccataaaaagtgtgtccaccacgagccagctcctcttggggcgcatggacgggcccaggaggccagtgaaatatgaggaggatgtgaatctcggctctggcacgcgggctgtggtaagctgcgctgaagctcccaacatgaagatcattggtaaccgcattgaaaggatccgcagtgagcacgcggaaacgtggttctttgacgagaaccacccatataggacatgggcttaccatggaagctatgaggcccccacacaagggtcagcgtcctctctaataaacggggttgtcaggctcctgtcaaaaccctgggatgtggtgactggagtcacaggaatagccatgaccgacaccacaccgtatggtcagcaaagagttttcaaggaaaaagtggacactagggtgccagacccccaagaaggcactcgtcaggttatgagcatggtctcttcctggttgtggaaagagctaggcaaacacaaacggccacgagtctgtaccaaagaagagttcatcaacaaggttcgtagcaatgcagcattaggggcaatatttgaagaggaaaaagagtggaagactgcagtggaagctgtgaacgatccaaggttctgggctctagtggacaaggaaagagagcaccacctgagaggagagtgccagagttgtgtgtacaacatgatgggaaaaagagaaaagaaacaaggggaatttggaaaggccaagggcagccgcgccatctggtatatgtggctaggggctagatttctagagttcgaagcccttggattcttgaacgaggatcactggatggggagagagaactcaggaggtggtgttgaagggctgggattacaaagactcggatatgtcctagaagagatgagtcgcataccaggaggaaggatgtatgcagatgacactgctggctgggacacccgcatcagcaggtttgatctggagaatgaagctctaatcaccaaccaaatggagaaagggcacagggccttggcattggccataatcaagtacacataccaaaacaaagtggtaaaggtccttagaccagctgaaaaagggaagacagttatggacattatttcgagacaagaccaaagggggagcggacaagttgtcacttacgctcttaacacatttaccaacctagtggtgcaactcattcggaatatggaggctgaggaagttctagagatgcaagacttgtggctgctgcggaggtcagagaaagtgaccaactggttgcagagcaacggatgggataggctcaaacgaatggcagtcagtggagatgattgcgttgtgaagccaattgatgataggtttgcacatgccctcaggttcttgaatgatatgggaaaagttaggaaggacacacaagagtggaaaccctcaactggatgggacaactgggaagaagttccgttttgctcccaccacttcaacaagctccatctcaaggacgggaggtccattgtggttccctgccgccaccaagatgaactgattggccgggcccgcgtctctccaggggcgggatggagcatccgggagactgcttgcctagcaaaatcatatgcgcaaatgtggcagctcctttatttccacagaagggacctccgactgatggccaatgccatttgttcatctgtgccagttgactgggttccaactgggagaactacctggtcaatccatggaaagggagaatggatgaccactgaagacatgcttgtggtgtggaacagagtgtggattgaggagaacgaccacatggaagacaagaccccagttacgaaatggacagacattccctatttgggaaaaagggaagacttgtggtgtggatctctcatagggcacagaccgcgcaccacctgggctgagaacattaaaaacacagtcaacatggtgcgcaggatcataggtgatgaagaaaagtacatggactacctatccacccaagttcgctacttgggtgaagaagggtctacacctggagtgctgtaagcaccaatcttagtgttgtcaggcctgctagtcagccacagcttggggaaagctgtgcagcctgtgacccccccaggagaagctgggaaaccaagcctatagtcaggccgagaacgccatggcacggaagaagccatgctgcctgtgagcccctcagaggacactgagtcaaaaaaccccacgcgcttggaggcgcaggatgggaaaagaaggtggcgaccttccccacccttcaatctggggcctgaactggagatcagctgtggatctccagaagagggactagtggttagaggaggtccacagaagggacctccgcagcatattgacgctgggaaagaccagagactccatgagtttccaccacgctggccgccaggcacagatcgccgattaagaattccaccaaaaagaattctgctgccataccatctccgaggatgtcccataaacttggttgcagagttttgtgaaatgttgcactccagtagaaggcagcagactaggctgggcgtggcggctcatgcctgtaatcccagcactttgggaggttgaggcaggtggatcacctgaggtcaggagttcgagaccagcttggccaacatggtgaaaccccgtctctactagaaacacaaacaattagccaggcatggtggcgggcgctgtaatcctagctactcgggagactgaggcaggagaattgcttgaacccaggaggcagaggttgcagtgagctgagatcgcaccattgcactccagcctgggcgacagagcaagactccgtct

SEQ ID NO: 295 - DNA, 10808 bp, Artificial Sequence
  Zika virus isolate ZIKV/H. sapiens/Brazil/Natal/2015
agttgttgatctgtgtgaatcagactgcgacagttcgagtttgaagcgaaagctagcaacagtatcaacaggttttattttggatttggaaacgagagtttctggtcatgaaaaacccaaaaaagaaatccggaggattccggattgtcaatatgctaaaacgcggagtagcccgtgtgagcccctttgggggcttgaagaggctgccagccggacttctgctgggtcatgggcccatcaggatggtcttggcaattctagcctttttgagattcacggcaatcaagccatcactgggtctcatcaatagatggggttcagtggggaaaaaagaggctatggaaataataaagaagttcaagaaagatctggctgccatgctgagaataatcaatgctaggaaggagaagaagagacgaggcgcagatactagtgtcggaattgttggcctcctgctgaccacagctatggcagcggaggtcactagacgtgggagtgcatactatatgtacttggacagaaacgatgctggggaggccatatcttttccaaccacattggggatgaataagtgttatatacagatcatggatcttggacacatgtgtgatgccaccatgagctatgaatgccctatgctggatgagggggtggaaccagatgacgtcgattgttggtgcaacacgacgtcaacttgggttgtgtacggaacctgccatcacaaaaaaggtgaagcacggagatctagaagagctgtgacgctcccctcccattccactaggaagctgcaaacgcggtcgcaaacctggttggaatcaagagaatacacaaagcacttgattagagtcgaaaattggatattcaggaaccctggcttcgcgttagcagcagctgccatcgcttggcttttgggaagctcaacgagccaaaaagtcatatacttggtcatgatactgctgattgccccggcatacagcatcaggtgcataggagtcagcaatagggactttgtggaaggtatgtcaggtgggacttgggttgatgttgtcttggaacatggaggttgtgtcaccgtaatggcacaggacaaaccgactgtcgacatagagctggttacaacaacagtcagcaacatggcggaggtaagatcctactgctatgaggcatcaatatcagacatggcttcggacagccgctgcccaacacaaggtgaagcctaccttgacaagcaatcagacactcaatatgtctgcaaaagaacgttagtggacagaggctggggaaatggatgtggactttttggcaaagggagcctggtgacatgcgctaagtttgcatgctccaagaaaatgaccgggaagagcatccagccagagaatctggagtaccggataatgctgtcagttcatggctcccagcacagtgggatgatcgttaatgacacaggacatgaaactgatgagaatagagcgaaggttgagataacgcccaattcaccaagagccgaagccaccctggggggttttggaagcctaggacttgattgtgaaccgaggacaggccttgacttttcagatttgtattacttgactatgaataacaagcactggttggtccacaaggagtggttccacgacattccattaccttggcacgctggggcagacaccggaactccacactggaacaacaaagaagcactggtagagttcaaggacgcacatgccaaaaggcaaactgtcgtggttctagggagtcaagaaggagcagttcacacggcccttgctggagctctggaggctgagatggatggtgcaaagggaaggctgtcctctggccacttgaaatgtcgcctgaaaatggataaacttagattgaagggcgtgtcatactccttgtgtaccgcagcgttcacattcaccaagatcccggctgaaacactgcacgggacagtcacagtggaggtacagtacgcagggacagatggaccttgcaaggttccagctcagatggcggtggacatgcaaactctgaccccagttgggaggttgataaccgctaaccccgtaatcactgaaagcactgagaactctaagatgatgctggaacttgatccaccatttggggactcttacattgtcataggagtcggggagaagaagatcacccaccactggcacaggagtggcagcaccattggaaaagcatttgaagccactgtgagaggtgccaagagaatggcagtcttgggagacacagcctgggactttggatcagttggaggcgctctcaactcattgggcaagggcatccatcaaatttttggagcagctttcaaatcattgtttggaggaatgtcctggttctcacaaatcctcattggaacgttgctgatgtggttgggtctgaacacaaagaatggatctatttcccttatgtgcttggccttagggggagtgttgatcttcttatccacagccgtctctgctgatgtggggtgctcggtggacttctcaaagaaggagacgagatgcggtacaggggtgttcgtctataacgacgttgaagcctggagggacaggtacaagtaccatcctgactccccccgtagattggcagcagcagtcaagcaagcctgggaagatggtatctgcgggatctcctctgtttcaagaatggagaacatcatgtggagatcagtagaaggggagctcaacgcaatcttggaagagaatggagttcaactgacggtcgttgtgggatctgtaaaaaaccccatgtggagaggtccacagagattgcccgtgcctgtgaacgagctgccccacggctggaaggcttgggggaaatcgtacttcgtcagagcagcaaagacaaataacagctttgtcgtggatggtgacacactgaaggaatgcccactcgaacatagagcatggaacagctttcttgtggaggatcatgggttcggggtatttcacactagtgtctggctcaaggttagagaagattattcattagagtgtgatccagccgttattggaacagctgttaaggggaaggaggctgtacacagtgatctaggctactggattgagagtgagaagaatgacacatggaggctgaagagggcccatctaatcgagatgaaaacatgtgaatggccaaagtcccacacattgtgggcagatggaatagaagagagtgatctgatcattcccaagtctttagctgggccactcagccatcacaataccagagagggctacaggacccaaatgaaagggccatggcacagtgaagagcttgaaattcggtttgaggaatgcccgggcactaaggtccacgtggaggaaacatgtggaacaagaggaccatctctgagatcaaccactgcaagcggaagggtgatcgaggaatggtgctgcagggagtgcacaatgcccccactgtcgttccgggctaaagatggctgttggtatggaatggagataaggcccaggaaagaaccagaaagcaacttagtaaggtcagtggtgactgcaggatcaactgatcacatggatcacttctcccttggagtgcttgtgattctgctcatggtgcaggaagggctgaagaagagaatgaccacaaagatcatcataagcacatcaatggcagtgctggtagctatgatcctgggaggattttcaatgagtgacctggctaagcttgcaattttgatgggcgccaccttcgcggaaatgaacactggaggagatgtagctcatctggcgctgatagcggcattcaaagtcagaccagcgttgctggtatctttcatcttcagagctaattggacaccccgtgaaagcatgctgctggccttggcctcgtgtcttttgcaaactgcgatctccgccttggaaggcgacctgatggttctcatcaatggttttgctttggcctggttggcaatacgagcgatggttgttccacgcactgataacatcaccttggcaatcctggctgctctgacaccactggcccggggcacactgcttgtggcgtggagagcaggccttgctacttgcggggggtttatgctcctctctctgaagggaaaaggcagtgtgaagaagaacttaccatttgtcatggccctgggactaaccgctgtgaggctggtcgaccccatcaacgtggtgggactgctgttgctcacaaggagtgggaagcggagctggccccctagcgaagtactcacagctgttggcctgatatgcgcattggctggagggttcgccaaggcagatatagagatggctgggcccatggccgcggtcggtctgctaattgtcagttacgtggtctcaggaaagagtgtggacatgtacattgaaagagcaggtgacatcacatgggaaaaagatgcggaagtcactggaaacagtccccggctcgatgtggcgctagatgagagtggtgatttctccctggtggaggatgacggtccccccatgagagagatcatactcaaggtggtcctgatgaccatctgtggcatgaacccaatagccataccctttgcagctggagcgtggtacgtatacgtgaagactggaaaaaggagtggtgctctatgggatgtgcctgctcccaaggaagtaaaaaagggggagaccacagatggagtgtacagagtaatgactcgtagactgctaggttcaacacaagttggagtgggagttatgcaagagggggtctttcacactatgtggcacgtcacaaaaggatccgcgctgagaagcggtgaagggagacttgatccatactggggagatgtcaagcaggatctggtgtcatactgtggtccatggaagctagatgccgcctgggacgggcacagcgaggtgcagctcttggccgtgccccccggagagagagcgaggaacatccagactctgcccggaatatttaagacaaaggatggggacattggagcggttgcgctggattacccagcaggaacttcaggatctccaatcctagacaagtgtgggagagtgataggactttatggcaatggggtcgtgatcaaaaatgggagttatgttagtgccatcacccaagggaggagggaggaagagactcctgttgagtgcttcgagccttcgatgctgaagaagaagcagctaactgtcttagacttgcatcctggagctgggaaaaccaggagagttcttcctgaaatagtccgtgaagccataaaaacaagactccgtactgtgatcttagctccaaccagggttgtcgctgctgaaatggaggaagcccttagagggcttccagtgcgttatatgacaacagcagtcaatgtcacccactctggaacagaaatcgtcgacttaatgtgccatgccaccttcacttcacgtctactacagccaatcagagtccccaactataatctgtatattatggatgaggcccacttcacagatccctcaagtatagcagcaagaggatacatttcaacaagggttgagatgggcgaggcggctgccatcttcatgaccgccacgccaccaggaacccgtgacgcatttccggactccaactcaccaattatggacaccgaagtggaagtcccagagagagcctggagctcaggctttgattgggtgacggatcattctggaaaaacagtttggtttgttccaagcgtgaggaacggcaatgagatcgcagcttgtctgacaaaggctggaaaacgggtcatacagctcagcagaaagacttttgagacagagttccagaaaacaaaacatcaagagtgggactttgtcgtgacaactgacatttcagagatgggcgccaactttaaagctgaccgtgtcatagattccaggagatgcctaaagccggtcatacttgatggcgagagagtcattttggctggacccatgcctgtcacacatgccagcgctgcccagaggagggggcgcataggcaggaatcccaacaaacctggagatgagtatctgtatggaggtgggtgcgcagagactgacgaagaccatgcacactggcttgaagcaagaatgctccttgacaatatttacctccaagatggcctcatagcctcgctctatcgacctgaggccgacaaagtagcagccattgagggagagttcaagcttaggacggagcaaaggaagacctttgtggaactcatgaaaagaggagatcttcctgtttggctggcctatcaggttgcatctgccggaataacctacacagatagaagatggtgctttgatggcacgaccaacaacaccataatggaagacagtgtgccggcagaggtgtggaccagacacggagagaaaagagtgctcaaaccgaggtggatggacgccagagtttgttcagatcatgcggccctgaagtcattcaaggagtttgccgctgggaaaagaggagcggcttttggagtgatggaagccctgggaacactgccaggacacatgacagagagattccaggaagccattgacaacctcgctgtgctcatgcgggcagagactggaagcaggccttacaaagccgcggcggcccaattgccggagaccctagagaccattatgcttttggggttgctgggaacagtctcgctgggaatctttttcgtcttgatgaggaacaagggcatagggaagatgggctttggaatggtgactcttggggccagcgcatggctcatgtggctctcggaaattgagccagccagaattgcatgtgtcctcattgttgtgttcctattgctggtggtgctcatacctgagccagaaaagcaaagatctccccaggacaaccaaatggcaatcatcatcatggtagcagtaggtcttctgggcttgattaccgccaatgaactcggatggttggagagaacaaagagtgacctaagccatctaatgggaaggagagaggagggagcaaccataggattctcaatggacattgacctgcggccagcctcagcttgggccatctatgctgccttgacaactttcattaccccagccgtccaacatgcagtgaccacttcatacaacaactactccttaatggcgatggccacgcaagctggagtgttgtttggtatgggcaaagggatgccattctacgcatgggactttggagtcccgctgctaatgataggttgctactcacaattaacacccctgaccctaatagtggccatcattttgctcgtggcgcactacatgtacttgatcccagggctgcaggcagcagctgcgcgtgctgcccagaagagaacggcagctggcatcatgaagaaccctgttgtggatggaatagtggtgactgacattgacacaatgacaattgacccccaagtggagaaaaagatgggacaggtgctactcatagcagtagcagtctccagcgccatactgtcgcggaccgcctgggggtggggggaggctggggccctgatcacagccgcaacttccactttgtgggaaggctctccgaacaagtactggaactcctctacagccacttcactgtgtaacatttttaggggaagttacttggctggagcttctctaatctacatagtaacaagaaacgctggcttggtcaagagacgtgggggtggaacaggagagaccctgggagagaaatggaaggcccgcttgaaccagatgtcggccctggagttctactcctacaaaaagtcaggcatcaccgaggtgtgcagagaagaggcccgccgcgccctcaaggatggtgtggcaacgggaggccatgctgtgtcccgaggaagtgcaaagctgagatggttggtggagcggggatacctgcagccctatggaaaggtcattgatcttggatgtggcagagggggctggagttactacgccgccaccatccgcaaagttcaagaagtgaaaggatacacaaaaggaggccctggtcatgaagaacccgtgttggtgcaaagctatgggtggaacatagtccgtcttaagagtggggtggacgtctttcatatggcggctgagccgtgtgacacgttgctgtgtgacataggtgagtcatcatctagtcctgaagtggaagaagcacggacgctcagagtcctctccatggtgggggattggcttgaaaaaagaccaggagccttttgtataaaagtgttgtgcccatacaccagcactatgatggaaaccctggagcgactgcagcgtaggtatgggggaggactggtcagagtgccactctcccgcaactctacacatgagatgtactgggtctctggagcgaaaagcaacaccataaaaagtgtgtccaccacgagccagctcctcttggggcgcatggacgggcctaggaggccagtgaaatatgaggaggatgtgaatctcggctctggcacgcgggctgtggtaagctgcgctgaagctcccaacatgaagatcattggtaaccgcattgaaaggatccgcagtgagcacgcggaaacgtggttctttgacgagaaccacccatataggacatgggcttaccatggaagctatgaggcccccacacaagggtcagcgtcctctctaataaacggggttgtcaggctcctgtcaaaaccctgggatgtggtgactggagtcacaggaatagccatgaccgacaccacaccgtatggtcagcaaagagttttcaaggaaaaagtggacactagggtgccagacccccaagaaggcactcgtcaggttatgagcatggtctcttcctggttgtggaaagagctaggcaaacacaaacggccacgagtctgtaccaaagaagagttcatcaacaaggttcgtagcaatgcagcattaggggcaatatttgaagaggaaaaagagtggaagactgcagtggaagctgtgaacgatccaaggttctgggctctagtggacaaggaaagagagcaccacctgagaggagagtgccagagttgtgtgtacaacatgatgggaaaaagagaaaagaaacaaggggaatttggaaaggccaagggcagccgcgccatctggtatatgtggctaggggctagatttctagagttcgaagcccttggattcttgaacgaggatcactggatggggagagagaactcaggaggtggtgttgaagggctgggattacaaagactcggatatgtcctagaagagatgagtcgcataccaggaggaaggatgtatgcagatgacactgctggctgggacacccgcatcagcaggttcgatctggagaatgaagctctaatcaccaaccaaatggagaaagggcatagggccttggcattggccataatcaagtacacataccaaaacaaagtggtaaaggtccttagaccagctgaaaaagggaaaacagttatggacattatttcgagacaagaccaaagggggagcggacaagttgtcacttacgctcttaacacatttaccaacctagtggtgcaactcattcggaatatggaggctgaggaagttctagagatgcaagacttgtggctgctgcggaggtcagagaaagtgaccaactggttgcagagcaacggatgggataggctcaaacgaatggcagtcagtggagatgattgcgttgtgaagccaattgatgataggtttgcacatgccctcaggttcttgaatgatatgggaaaagttaggaaggacacacaagagtggaaaccctcaactggatgggacaactgggaagaagttccgttttgctcccaccacttcaacaagctccatctcaaggacgggaggtccattgtggttccctgccgccaccaagatgaactgattggccgggcccgcgtctctccaggggcgggatggagcatccgggagactgcttgcctagcaaaatcatatgcgcaaatgtggcagctcctttatttccacagaagggacctccgactgatggccaatgccatttgttcatctgtgccagttgactgggttccaactgggagaactacctggtcaatccatggaaagggagaatggatgaccactgaagacatgcttgtggtgtggaacagagtgtggattgaggagaacgaccacatggaagacaagaccccagttacgaaatggacagacattccctatttgggaaaaagggaagacttgtggtgtggatctctcatagggcacagaccgcgcaccacctgggctgagaacattaaaaacacagtcaacatggtgcgcaggatcataggtgatgaagaaaagtacatggactacctatccacccaagttcgctacttgggtgaagaagggtctacacctggagtgctgtaagcaccaatcttaatgttgtcaggcctgctagtcagccacagcttggggaaagctgtgcagcctgtgacccccccaggagaagctgggaaaccaagcctatagtcaggccgagaacgccatggcacggaagaagccatgctgcctgtgagcccctcagaggacactgagtcaaaaaaccccatgcgcttggaggcgcaggatgggaaaagaaggtggcgaccttccccacccttcaatctggggcctgaactggagatcagctgtggatctccagaagagggactagtggttagaggagaccccccggaaaacgcaaaacagcatattgacgctgggaaagaccagagactccatgagtttccaccacgctggccgccaggcacagatcgccgaatagcggcggccggtgtggggaaatccatgggtctt

SEQ ID NO: 296 - DNA, 10806 bp, Artificial Sequence
  Zika virus isolate 1034511
gttgttgatctgtgtgaatcagactgcgacagttcgagtttgaagcgaaagctagcaacagtatcaacaggttttattttggatttggaaacgagagtttctggtcatgaaaaacccaaaaaagaaatccggaggattccggattgtcaatatgctaaaacgcggagtagcccgtgtgagcccctttgggggcttgaagaggctgccagccggacttctgctgggtcatgggcccatcaggatggtcttggcgattctagcctttttgagattcacggcaatcaagccatcactgggtctcatcaatagatggggttcagtggggaaaaaagaggctatggaaataataaagaagttcaagaaagatctggctgccatgctgagaataatcaatgctaggaaggagaagaagagacgaggcgcagatactagtgtcggaattgttggcctcctgctgaccacagctatggcagcggaggtcactagacgtgggagtgcatactatatgtacttggacagaaacgatgctggggaggccatatcttttccaaccacattggggatgaataagtgttatatacagatcatggatcttggacacatgtgtgatgccaccatgagctatgaatgccctatgctggatgagggggtggaaccagatgacgtcgattgttggtgcaacacgacgtcaacttgggttgtgtacggaacctgccatcacaaaaaaggtgaagcacggagatctagaagagctgtgacgctcccctcccattccactaggaagctgcaaacgcggtcgcaaacctggttggaatcaagagaatacacaaagcacttgattagagtcgaaaattggatattcaggaaccctggcttcgcgttagcagcagctgccatcgcttggcttttgggaagctcaacgagccaaaaagtcatatacttggtcatgatactgctgattgccccggcatacagcatcaggtgcataggagtcagcaatagggactttgtggaaggtatgtcaggtgggacttgggttgatgttgtcttggaacatggaggttgtgtcaccgtaatggcacaggacaaaccgactgtcgacatagagctggttacaacaacagtcagcaacatggcggaggtaagatcctactgctatgaggcatcaatatcagacatggcttcggacagccgctgcccaacacaaggtgaagcctaccttgacaagcaatcagacactcaatatgtctgcaaaagaacgttagtggacagaggctggggaaatggatgtggactttttggcaaagggagcctggtgacatgcgctaagtttgcatgctccaagaaaatgaccgggaagagcatccagccagagaatctggagtaccggataatgctgtcagttcatggctcccagcacagtgggatgatcgttaatgacacaggacatgaaactgatgagaatagagcgaaggttgagataacgcccaattcaccaagagccgaagccaccctggggggttttggaagcctaggacttgattgtgaaccgaggacaggccttgacttttcagatttgtattacttgactatgaataacaagcactggttggttcacaaggagtggttccacgacattccattaccttggcacgctggggcagacaccggaactccacactggaacaacaaagaagcactggtagagttcaaggacgcacatgccaaaaggcaaactgtcgtggttctagggagtcaagaaggagcagttcacacggcccttgctggagctctggaggctgagatggatggtgcaaagggaaggctgtcctctggccacttgaaatgtcgcctgaaaatggataaacttagattgaagggcgtgtcatactccttgtgtaccgcagcgttcacattcaccaagatcccggctgaaacactgcacgggacagtcacagtggaggtacagtacgcagggacagatggaccttgcaaggttccagctcagatggcggtggacatgcaaactctgaccccagttgggaggttgataaccgctaaccccgtaatcactgaaagcactgagaactctaagatgatgctggaacttgatccaccatttggggactcttacattgtcataggagtcggggagaagaagatcacccaccactggcacaggagtggcagcaccattggaaaagcatttgaagccactgtgagaggtgccaagagaatggcagtcttgggagacacagcctgggactttggatcagttggaggcgctctcaactcattgggcaagggcatccatcaaatttttggagcagctttcaaatcattgtttggaggaatgtcctggttctcacaaattctcattggaacgttgctgatgtggttgggtctgaacacaaagaatggatctatttcccttatgtgcttggccttagggggagtgttgatcttcttatccacagccgtctctgctgatgtggggtgctcggtggacttctcaaagaaggagacgagatgcggtacaggggtgttcgtctataacgacgttgaagcctggagggacaggtacaagtaccatcctgactccccccgtagattggcagcagcagtcaagcaagcctgggaagatggtatctgcgggatctcctctgtttcaagaatggaaaacatcatgtggagatcagtagaaggggagctcaacgcaatcctggaagagaatggagttcaactgacggtcgttgtgggatctgtaaaaaaccccatgtggagagctccacagagattgcccgtgcctgtgaacgagctgccccacggctggaaggcttgggggaaatcgtacttcgtcagagcagcaaagacaaataacagctttgtcgtggatggtgacacactgaaggaatgcccactcaaacatagagcatggaacagctttcttgtggaggatcatgggttcggggtatttcacactagtgtctggctcaaggttagagaagattattcattagagtgtgatccagccgttattggaacagctgttaagggaaaggaggctgtacacagtgatctaggctactggattgagagtgagaagaatgacacatggaggctgaagagggcccatctgatcgagatgaaaacatgtgaatggccaaagtcccacacattgtggacagatggaatagaagagagtgatctgatcatacccaagtctttagctgggccactcagccatcacaataccagagagggctacaggacccaaatgaaagggccatggcacagtgaagagcttgaaattcggtttgaggaatgcccaggcactaaggtccacgtggaggaaacatgtggaacaagaggaccatctctgagatcaaccactgcaagcggaagggtgatcgaggaatggtgctgcagggagtgcacaatgcccccactgtcgttccgggctaaagatggctgttggtatggaatggagataaggcccaggaaagaaccagaaagcaacttagtaaggtcaatggtgactgcaggatcaactgatcacatggatcacttctcccttggagtgcttgtgattctgctcatggtgcaggaagggctaaagaagagaatgaccacaaagatcatcataagcacatcaatggcagtgctggtagctatgatcctgggaggattttcaatgagtgacctggctaagcttgcaattttgatgggtgccaccttcgcggaaatgaacactggaggagatgtagctcatctggcgctgatagcggcattcaaagtcagaccagcgttgctggtatctttcatcttcagagctaattggacaccccgtgaaagcatgctactggccttggcctcgtgtcttttgcaaactgcgatctccgccttggaaggcgacctgatggttctcatcaatggttttgctttggcctggttggcaatacgagcgatggttgttccacgcactgataacatcaccttggcaatcctggctgctctgacaccactggcccggggcacactgcttgtggcgtggagagcaggccttgctacttgcggggggtttatgctcctctctctgaagggaaaaggcagtgtgaagaagaacttaccatttgtcatggccctgggactaaccgctgtgaggctggtcgaccccatcaacgtggtgggactgctgttgctcacaaggagtgggaagcggagctggccccctagcgaagtactcacagctgttggcctgatatgcgcattggctggagggttcgccaaggcagatatagagatggctgggcccatggccgcggtcggtctgctaattgtcagttacgtggtctcaggaaagagtgtggacatgtacattgaaagagcaggtgacatcacatgggaaaaagatgcggaagtcactggaaacagtccccggctcgatgtggcgctagatgagagtggtgatttctccctggtggaggatgacggtccccccatgagagagatcatactcaaggtggtcctgatgaccatctgtggcatgaacccaatagccatacccttcgcagctggagcgtggtacgtatacgtgaagactggaaaaaggagtggtgctctatgggatgtgcctgctcccaaggaagtaaaaaagggggagaccacagatggagtgtacagagtaatgactcgtagactgctaggttcaacacaagttggagtgggagttatgcaagagggggtctttcacactatgtggcacgtcacaaaaggatccgcactgagaagcggtgaagggagacttgatccatactggggagatgtcaagcaggatctggtgtcatactgtggtccatggaagctagatgccgcctgggacgggcacagcgaggtgcagctcttggccgtgccccccggagagagagcgaggaacatccagactctgcccggaatatttaagacaaaggatggggacattggagcggttgcgctggattacccagcaggaacttcaggatctccaatcctagacaagtgtgggagagtgataggactttatggcaatggggtcgtgatcaaaaatgggagttatgttagtgccatcacccaagggaggagggaggaagagactcctgttgagtgcttcgagccttcgatgctgaagaagaagcagctaactgtcttagacttacatcctggagctgggaaaaccaggagagttcttcctgaaatagtccgtgaagccataaaaacaagactccgtactgtgatcttagctccaaccagggttgtcgctgctgaaatggaggaggcccttagagggcttccagtgcgttatatgacaacagcagtcaatgtcacccactctggaacagaaatcgtcgacttaatgtgccatgccaccttcacttcacgtctactacagccaatcagagtccccaactataatctgtatattatggatgaggcccacttcacagatccctcaagtatagcagcaagaggatacatttcaacaagggttgagatgggcgaggcggctgccatcttcatgaccgccacgccaccaggaacccgtgacgcatttccggactccaactcaccaattatggacaccgaagtggaagtcccagagagagcctggagctcaggctttgattgggtgacggatcattctggaaaaacagtttggtttgttccaagcgtgaggaacggcaatgagatcgcagcttgtctgacaaaggctggaaaacgggtcatacagctcagcagaaagacttttgagacagagttccagaaaacaaaacatcaagagtgggactttgtcgtgacaactgacatttcagagatgggcgccaactttaaagctgaccgtgtcatagattccaggagatgcctaaagccggtcatacttgatggcgagagagtcattctggctggacccatgcctgtcacacatgccagcgctgcccagaggagggggcgcataggcaggaatcccaacaaacctggagatgagtatctgtatggaggtgggtgcgcagagactgacgaagaccatgcacactggcttgaagcaagaatgctccttgacaatatttacctccaagatggcctcatagcctcgctctatcgacctgaggccgacaaagtagcagccattgagggagagttcaagcttaggacggagcaaaggaagacctttgtggaactcatgaaaagaggagatcttcctgtttggctggcctatcaggttgcatctgccggaataacctacacagatagaagatggtgctttgatggcacgaccaacaacaccatactggaagacagcgtgccggcagaggtgtggaccagacacggagagaaaagagtgctcaaaccgaggtggatggacgccagagtttgttcagatcatgcggccctgaagtcattcaaggagtttgccgctgggaaaagaggagcggcttttggagtgatggaagccctgggaacactgccaggacacatgacagagagattccaggaagccattgacaacctcgctgtgctcatgcgggcagagactggaagcaggccttacaaagccgcggcggcccaattgccggagaccctagagaccattatgcttttggggttgctgggaacagtctcgctgggaatctttttcgtcttgatgaggaacaagggcatagggaagatgggctttggaatggtgacccttggggccagtgcatggctcatgtggctctcggaaattgagccagccagaattgcatgcgtcctcattgttgtgttcctattgctggtggtgctcatacctgagccagaaaagcaaagatctccccaggacaaccaaatggcaatcatcatcatggtagcagtaggtcttctgggcttgattaccgccaatgaactcggatggttggagagaacaaagagtgacctaagccatctaatgggaaggagagaggagggggcaaccataggattctcaatggacattgacctgcggccagcctcagcttgggccatctatgctgccttgacaactttcattaccccagccgtccaacatgcagtgaccacttcatacaacaactactccttaatggcgatggccacgcaagctggagtgttgtttggtatgggcaaagggatgccattctacgcatgggactttggagtcccgctgctaatgataggttgctactcacaattaacacccctgaccctaatagtggccatcattttgctcgtggcgcactacatgtacttgatcccagggctgcaggcagcagctgcgcgtgctgcccagaagagaacggcagctggcatcatgaagaaccctgttgtggatggaatagtggtgactgacattgacacaatgacaattgacccccaagtggagaaaaagatgggacaggtgctactcatagcagtagccgtctccagcgccatactgtcgcggaccgcctgggggtggggggaggctggggccctgatcacagccgcaacttccactttgtgggaaggctctccgaacaagtactggaactcctctacagccacttcactgtgtaacatttttaggggaagttacttggctggagcctctctaatctacacagtaacaagaaacgctggcttggtcaagagacgtgggggtggaacaggagagaccctgggagagaaatggaaggcccgcttgaaccagatgtcggccctggagttctactcctacaaaaagtcaggcatcaccgaggtgtgcagagaagaggcccgccgcgccctcaaggacggtgtggcaacgggaggccatgctgtgtcccgaggaagtgcaaagctgagatggttggtggagcggggatacctgcagccctatggaaaggtcattgatcttggatgtggcagagggggctggagttactacgccgccaccatccgcaaagttcaagaagtgaaaggatacacaaaaggaggccctggtcatgaagaacccgtgttggtgcaaagctatgggtggaacattgtccgtcttaagagtggggtggacgtctttcatatggcggctgagccgtgtgacacgttgctgtgtgacataggtgagtcatcatctagtcctgaagtggaagaagcacggacgctcagagtcctctccatggtgggggattggcttgaaaaaagaccaggagccttttgtataaaagtgttgtgcccatacaccagcactatgatggaaaccctggagcgactgcagcgtaggtatgggggaggactggtcagagtgccactctcccgcaactctacacatgagatgtactgggtctctggagcgaaaagcaacaccataaaaagtgtgtccaccacgagccagctcctcttggggcgcatggacgggcctaggaggccagtgaaatatgaggaggatgtgaatctcggctctggcacgcgggctgtggtaagctgcgctgaagctcccaacatgaagatcattggtaaccgcattgaaaggatccgcagtgagcacgcggaaacgtggttctttgacgagaaccacccatataggacatgggcttaccatggaagctatgaggcccccacacaagggtcagcgtcctctctaataaacggggttgtcaggctcctgtcaaaaccctgggatgtggtgactggagtcacaggaatagccatgaccgacaccacaccgtatggtcagcaaagagttttcaaggaaaaagtggacactagggtgccagacccccaagaaggcactcgtcaggttatgagcatggtctcttcctggttgtggaaagagctaggcaaacacaaacggccacgagtctgtaccaaagaagagttcatcaacaaggttcgtagcaatgcagcattaggggcaatatttgaagaggaaaaagagtggaagactgcagtggaagctgtgaacgatccaaggttctgggctctagtggacaaggaaagagagcaccacctgagaggagagtgccagagttgtgtgtacaacatgatgggaaaaagagaaaagaaacaaggggaatttggaaaggccaagggcagccgcgccatctggtatatgtggctaggggctagatttctagagttcgaagcccttggattcttgaacgaggatcactggatggggagagagaactcaggaggtggtgttgaagggctgggattacaaagactcggatatgtcctagaagagatgagttgcataccaggaggaaggatgtatgcagatgacactgctggctgggacacccgcatcagcaggtttgatctggagaatgaagctctaatcaccaaccaaatggagaaagggcacagggccttggcattggccataatcaagtacacataccaaaacaaagtggtaaaggtccttagaccagctgaaaaagggaaaacagttatggacattatttcgagacaagaccaaagggggagcggacaagttgtcacttacgctcttaacacatttaccaacctagtggtgcaactcattcggaatatggaggctgaggaagttctagagatgcaagacttgtggctgctgcggaggtcagagaaagtgaccaactggttgcagagcaacggatgggataggctcaaacgaatggcagtcagtggagatgattgcgttgtgaagccaattgatgataggtttgcacatgccctcaggttcttgaatgatatgggaaaagttaggaaggacacacaagagtggaaaccctcaactggatgggacaactgggaagaagttccgttttgctcccaccacttcaacaagctccatctcaaggacgggaggtccattgtggttccctgccgccaccaagatgaactgattggccgggcccgcgtctctccaggggcgggatggagcatccgggagactgcttgcctagcaaaatcatatgcgcaaatgtggcagctcctttatttccacagaagggacctccgactgatggccaatgccatttgttcatctgtgccagttgactgggttccaactgggagaactacctggtcaatccatggaaagggagaatggatgaccactgaagacatgcttgtggtgtggaacagagtgtggattgaggagaacgaccacatggaagacaagaccccagttacgaaatggacagacattccctatttgggaaaaagggaagacttgtggtgtggatctctcatagggcacagaccgcgcaccacctgggctgagaacattaaaaacacagtcaacatggtgcgcaggatcataggtgatgaagaaaagtacatggactacctatccacccaagttcgctacttgggtgaagaagggtctacacctggagtgctgtaagcaccaatcttaacgttgtcaggcctgctagtcagccacagcttggggaaagctgtgcagcctgtgacccccccaggagaagctgggaaaccaagcctatagtcaggccgagaacgccatggcacggaagaagccatgctgcctgtgagcccctcagaggacactgagtcaaaaaaccccacgcgcttggaggcgcaggatgggaaaagaaggtggcgaccttccccacccttcaatctggggcctgaactggagatcagctgtggatctccagaagagggactagtggttagaggagaccccccggaaaacgcaaaacagcatattgacgctgggaaagaccagagactccatgagtttccaccacgctggccgccaggcacagatcgccgaatagcggcggccggtgtggggaaatccatgggtct

SEQ ID NO: 297 - DNA, 10794 bp, Artificial Sequence
  Zika virus strain MR 766
agttgttgatctgtgtgagtcagactgcgacagttcgagtctgaagcgagagctaacaacagtatcaacaggtttaatttggatttggaaacgagagtttctggtcatgaaaaaccccaaagaagaaatccggaggatccggattgtcaatatgctaaaacgcggagtagcccgtgtaaaccccttgggaggtttgaagaggttgccagccggacttctgctgggtcatggacccatcagaatggttttggcgatactagcctttttgagatttacagcaatcaagccatcactgggccttatcaacagatggggttccgtggggaaaaaagaggctatggaaataataaagaagttcaagaaagatcttgctgccatgttgagaataatcaatgctaggaaagagaggaagagacgtggcgcagacaccagcatcggaatcattggcctcctgctgactacagccatggcagcagagatcactagacgcgggagtgcatactacatgtacttggataggagcgatgccgggaaggccatttcgtttgctaccacattgggagtgaacaagtgccacgtacagatcatggacctcgggcacatgtgtgacgccaccatgagttatgagtgccctatgctggatgagggagtggaaccagatgatgtcgattgctggtgcaacacgacatcaacttgggttgtgtacggaacctgtcatcacaaaaaaggtgaggcacggcgatctagaagagccgtgacgctcccttctcactctacaaggaagttgcaaacgcggtcgcagacctggttagaatcaagagaatacacgaagcacttgatcaaggttgaaaactggatattcaggaaccccgggtttgcgctagtggccgttgccattgcctggcttttgggaagctcgacgagccaaaaagtcatatacttggtcatgatactgctgattgccccggcatacagtatcaggtgcattggagtcagcaatagagacttcgtggagggcatgtcaggtgggacctgggttgatgttgtcttggaacatggaggctgcgttaccgtgatggcacaggacaagccaacagtcgacatagagttggtcacgacgacggttagtaacatggccgaggtaagatcctattgctacgaggcatcgatatcggacatggcttcggacagtcgttgcccaacacaaggtgaagcctaccttgacaagcaatcagacactcaatatgtctgcaaaagaacattagtggacagaggttggggaaacggttgtggactttttggcaaagggagcttggtgacatgtgccaagtttacgtgttctaagaagatgaccgggaagagcattcaaccggaaaatctggagtatcggataatgctatcagtgcatggctcccagcatagcgggatgattggatatgaaactgacgaagatagagcgaaagtcgaggttacgcctaattcaccaagagcggaagcaaccttgggaggctttggaagcttaggacttgactgtgaaccaaggacaggccttgacttttcagatctgtattacctgaccatgaacaataagcattggttggtgcacaaagagtggtttcatgacatcccattgccttggcatgctggggcagacaccggaactccacactggaacaacaaagaggcattggtagaattcaaggatgcccacgccaagaggcaaaccgtcgtcgttctggggagccaggaaggagccgttcacacggctctcgctggagctctagaggctgagatggatggtgcaaagggaaggctgttctctggccatttgaaatgccgcctaaaaatggacaagcttagattgaagggcgtgtcatattccttgtgcactgcggcattcacattcaccaaggtcccagctgaaacactgcatggaacagtcacagtggaggtgcagtatgcagggacagatggaccctgcaagatcccagtccagatggcggtggacatgcagaccctgaccccagttggaaggctgataaccgccaaccccgtgattactgaaagcactgagaactcaaagatgatgttggagcttgacccaccatttggggattcttacattgtcataggagttggggacaagaaaatcacccaccactggcataggagtggtagcaccatcggaaaggcatttgaggccactgtgagaggcgccaagagaatggcagtcctgggggatacagcctgggacttcggatcagtcgggggtgtgttcaactcactgggtaagggcattcaccagatttttggagcagccttcaaatcactgtttggaggaatgtcctggttctcacagatcctcataggcacgctgctagtgtggttaggtttgaacacaaagaatggatctatctccctcacatgcttggccctggggggagtgatgatcttcctctccacggctgtttctgctgacgtggggtgctcagtggacttctcaaaaaaggaaacgagatgtggcacgggggtattcatctataatgatgttgaagcctggagggaccggtacaagtaccatcctgactccccccgcagattggcagcagcagtcaagcaggcctgggaagaggggatctgtgggatctcatccgtttcaagaatggaaaacatcatgtggaaatcagtagaaggggagctcaatgctatcctagaggagaatggagttcaactgacagttgttgtgggatctgtaaaaaaccccatgtggagaggtccacaaagattgccagtgcctgtgaatgagctgccccatggctggaaagcctgggggaaatcgtattttgttagggcggcaaagaccaacaacagttttgttgtcgacggtgacacactgaaggaatgtccgcttgagcacagagcatggaatagttttcttgtggaggatcacgggtttggagtcttccacaccagtgtctggcttaaggtcagagaagattactcattagaatgtgacccagccgtcataggaacagctgttaagggaagggaggccgcgcacagtgatctgggctattggattgaaagtgaaaagaatgacacatggaggctgaagagggcccacctgattgagatgaaaacatgtgaatggccaaagtctcacacattgtggacagatggagtagaagaaagtgatcttatcatacccaagtctttagctggtccactcagccaccacaacaccagagagggttacagaacccaagtgaaagggccatggcacagtgaagagcttgaaatccggtttgaggaatgtccaggcaccaaggtttacgtggaggagacatgcggaactagaggaccatctctgagatcaactactgcaagtggaagggtcattgaggaatggtgctgtagggaatgcacaatgcccccactatcgtttcgagcaaaagacggctgctggtatggaatggagataaggcccaggaaagaaccagagagcaacttagtgaggtcaatggtgacagcggggtcaaccgatcatatggaccacttctctcttggagtgcttgtgattctactcatggtgcaggaggggttgaagaagagaatgaccacaaagatcatcatgagcacatcaatggcagtgctggtagtcatgatcttgggaggattttcaatgagtgacctggccaagcttgtgatcctgatgggtgctactttcgcagaaatgaacactggaggagatgtagctcacttggcattggtagcggcatttaaagtcagaccagccttgctggtctccttcattttcagagccaattggacaccccgtgagagcatgctgctagccctggcttcgtgtcttctgcaaactgcgatctctgctcttgaaggtgacttgatggtcctcattaatggatttgctttggcctggttggcaattcgagcaatggccgtgccacgcactgacaacatcgctctaccaatcttggctgctctaacaccactagctcgaggcacactgctcgtggcatggagagcgggcctggctacttgtggagggatcatgctcctctccctgaaagggaaaggtagtgtgaagaagaacctgccatttgtcatggccctgggattgacagctgtgagggtagtagaccctattaatgtggtaggactactgttactcacaaggagtgggaagcggagctggccccctagtgaagttctcacagccgttggcctgatatgtgcactggccggagggtttgccaaggcagacattgagatggctggacccatggctgcagtaggcttgctaattgtcagctatgtggtctcgggaaagagtgtggacatgtacattgaaagagcaggtgacatcacatgggaaaaggacgcggaagtcactggaaacagtcctcggcttgacgtggcactggatgagagtggtgacttctccttggtagaggaagatggtccacccatgagagagatcatactcaaggtggtcctgatggccatctgtggcatgaacccaatagctataccttttgctgcaggagcgtggtatgtgtatgtgaagactgggaaaaggagtggcgccctctgggacgtgcctgctcccaaagaagtgaagaaaggagagaccacagatggagtgtacagagtgatgactcgcagactgctaggttcaacacaggttggagtgggagtcatgcaagagggagtcttccacaccatgtggcacgttacaaaaggagccgcactgaggagcggtgagggaagacttgatccatactggggggatgtcaagcaggacttggtgtcatactgtgggccttggaagttggatgcagcttgggatggactcagcgaggtacagcttttggccgtacctcccggagagagggccagaaacattcagaccctgcctggaatattcaagacaaaggacggggacatcggagcagttgctctggactaccctgcagggacctcaggatctccgatcctagacaaatgtggaagagtgataggactctatggcaatggggttgtgatcaagaatggaagctatgttagtgctataacccagggaaagagggaggaggagactccggttgaatgtttcgaaccctcgatgctgaagaagaagcagctaactgtcttggatctgcatccaggagccggaaaaaccaggagagttcttcctgaaatagtccgtgaagccataaaaaagagactccggacagtgatcttggcaccaactagggttgtcgctgctgagatggaggaggccttgagaggacttccggtgcgttacatgacaacagcagtcaacgtcacccattctgggacagaaatcgttgatttgatgtgccatgccactttcacttcacgcttactacaacccatcagagtccctaattacaatctcaacatcatggatgaagcccacttcacagacccctcaagtatagctgcaagaggatacatatcaacaagggttgaaatgggcgaggcggctgccatttttatgactgccacaccaccaggaacccgtgatgcgtttcctgactctaactcaccaatcatggacacagaagtggaagtcccagagagagcctggagctcaggctttgattgggtgacagaccattctgggaaaacagtttggttcgttccaagcgtgagaaacggaaatgaaatcgcagcctgtctgacaaaggctggaaagcgggtcatacagctcagcaggaagacttttgagacagaatttcagaaaacaaaaaatcaagagtgggactttgtcataacaactgacatctcagagatgggcgccaacttcaaggctgaccgggtcatagactctaggagatgcctaaaaccagtcatacttgatggtgagagagtcatcttggctgggcccatgcctgtcacgcatgctagtgctgctcagaggagaggacgtataggcaggaaccctaacaaacctggagatgagtacatgtatggaggtgggtgtgcagagactgatgaaggccatgcacactggcttgaagcaagaatgcttcttgacaacatctacctccaggatggcctcatagcctcgctctatcggcctgaggccgataaggtagccgccattgagggagagtttaagctgaggacagagcaaaggaagaccttcgtggaactcatgaagagaggagaccttcccgtctggctagcctatcaggttgcatctgccggaataacttacacagacagaagatggtgctttgatggcacaaccaacaacaccataatggaagacagtgtaccagcagaggtttggacaaagtatggagagaagagagtgctcaaaccgagatggatggatgctagggtctgttcagaccatgcggccctgaagtcgttcaaagaattcgccgctggaaaaagaggagcggctttgggagtaatggaggccctgggaacactgccaggacacatgacagagaggtttcaggaagccattgacaacctcgccgtgctcatgcgagcagagactggaagcaggccttataaggcagcggcagcccaactgccggagaccctagagaccattatgctcttaggtttgctgggaacagtttcactggggatcttcttcgtcttgatgcggaataagggcatcgggaagatgggctttggaatggtaacccttggggccagtgcatggctcatgtggctttcggaaattgaaccagccagaattgcatgtgtcctcattgttgtgtttttattactggtggtgctcatacccgagccagagaagcaaagatctccccaagataaccagatggcaattatcatcatggtggcagtgggccttctaggtttgataactgcaaacgaacttggatggctggaaagaacaaaaaatgacatagctcatctaatgggaaggagagaagaaggagcaaccatgggattctcaatggacattgatctgcggccagcctccgcctgggctatctatgccgcattgacaactctcatcaccccagctgtccaacatgcggtaaccacttcatacaacaactactccttaatggcgatggccacacaagctggagtgctgtttggcatgggcaaagggatgccatttatgcatggggaccttggagtcccgctgctaatgatgggttgctattcacaattaacacccctgactctgatagtagctatcattctgcttgtggcgcactacatgtacttgatcccaggcctacaagcggcagcagcgcgtgctgcccagaaaaggacagcagctggcatcatgaagaatcccgttgtggatggaatagtggtaactgacattgacacaatgacaatagacccccaggtggagaagaagatgggacaagtgttactcatagcagtagccatctccagtgctgtgctgctgcggaccgcctggggatggggggaggctggagctctgatcacagcagcgacctccaccttgtgggaaggctctccaaacaaatactggaactcctctacagccacctcactgtgcaacatcttcagaggaagctatctggcaggagcttcccttatctatacagtgacgagaaacgctggcctggttaagagacgtggaggtgggacgggagagactctgggagagaagtggaaagctcgtctgaatcagatgtcggccctggagttctactcttataaaaagtcaggtatcactgaagtgtgtagagaggaggctcgccgtgccctcaaggatggagtggccacaggaggacatgccgtatcccggggaagtgcaaagatcagatggttggaggagagaggatatctgcagccctatgggaaggttgttgacctcggatgtggcagagggggctggagctattatgccgccaccatccgcaaagtgcaggaggtgagaggatacacaaagggaggtcccggtcatgaagaacccatgctggtgcaaagctatgggtggaacatagttcgtctcaagagtggagtggacgtcttccacatggcggctgagccgtgtgacactctgctgtgtgacataggtgagtcatcatctagtcctgaagtggaagagacacgaacactcagagtgctctctatggtgggggactggcttgaaaaaagaccaggggccttctgtataaaggtgctgtgcccatacaccagcactatgatggaaaccatggagcgactgcaacgtaggcatgggggaggattagtcagagtgccattgtgtcgcaactccacacatgagatgtactgggtctctggggcaaagagcaacatcataaaaagtgtgtccaccacaagtcagctcctcctgggacgcatggatggccccaggaggccagtgaaatatgaggaggatgtgaacctcggctcgggtacacgagctgtggcaagctgtgctgaggctcctaacatgaaaatcatcggcaggcgcattgagagaatccgcaatgaacatgcagaaacatggtttcttgatgaaaaccacccatacaggacatgggcctaccatgggagctacgaagcccccacgcaaggatcagcgtcttccctcgtgaacggggttgttagactcctgtcaaagccttgggacgtggtgactggagttacaggaatagccatgactgacaccacaccatacggccaacaaagagtcttcaaagaaaaagtggacaccagggtgccagatccccaagaaggcactcgccaggtaatgaacatagtctcttcctggctgtggaaggagctggggaaacgcaagcggccacgcgtctgcaccaaagaagagtttatcaacaaggtgcgcagcaatgcagcactgggagcaatatttgaagaggaaaaagaatggaagacggctgtggaagctgtgaatgatccaaggttttgggccctagtggatagggagagagaacaccacctgagaggagagtgtcacagctgtgtgtacaacatgatgggaaaaagagaaaagaagcaaggagagttcgggaaagcaaaaggtagccgcgccatctggtacatgtggttgggagccagattcttggagtttgaagcccttggattcttgaacgaggaccattggatgggaagagaaaactcaggaggtggagtcgaagggttaggattgcaaagacttggatacattctagaagaaatgaatcgggcaccaggaggaaagatgtacgcagatgacactgctggctgggacacccgcattagtaagtttgatctggagaatgaagctctgattaccaaccaaatggaggaagggcacagaactctggcgttggccgtgattaaatacacataccaaaacaaagtggtgaaggttctcagaccagctgaaggaggaaaaacagttatggacatcatttcaagacaagaccagagagggagtggacaagttgtcacttatgctctcaacacattcaccaacttggtggtgcagcttatccggaacatggaagctgaggaagtgttagagatgcaagacttatggttgttgaggaagccagagaaagtgaccagatggttgcagagcaatggatgggatagactcaaacgaatggcggtcagtggagatgactgcgttgtgaagccaatcgatgataggtttgcacatgccctcaggttcttgaatgacatgggaaaagttaggaaagacacacaggagtggaaaccctcgactggatggagcaattgggaagaagtcccgttctgctcccaccacttcaacaagctgtacctcaaggatgggagatccattgtggtcccttgccgccaccaagatgaactgattggccgagctcgcgtctcaccaggggcaggatggagcatccgggagactgcctgtcttgcaaaatcatatgcgcagatgtggcagctcctttatttccacagaagagaccttcgactgatggctaatgccatttgctcggctgtgccagttgactgggtaccaactgggagaaccacctggtcaatccatggaaagggagaatggatgaccactgaggacatgctcatggtgtggaatagagtgtggattgaggagaacgaccatatggaggacaagactcctgtaacaaaatggacagacattccctatctaggaaaaagggaggacttatggtgtggatcccttatagggcacagaccccgcaccacttgggctgaaaacatcaaagacacagtcaacatggtgcgcaggatcataggtgatgaagaaaagtacatggactatctatccacccaagtccgctacttgggtgaggaagggtccacacccggagtgttgtaagcaccaattttagtgttgtcaggcctgctagtcagccacagtttggggaaagctgtgcagcctgtaacccccccaggagaagctgggaaaccaagctcatagtcaggccgagaacgccatggcacggaagaagccatgctgcctgtgagcccctcagaggacactgagtcaaaaaaccccacgcgcttggaagcgcaggatgggaaaagaaggtggcgaccttccccacccttcaatctggggcctgaactggagactagctgtgaatctccagcagagggactagtggttagaggagaccccccggaaaacgcaaaacagcatattgacgtgggaaagaccagagactccatgagtttccaccacgctggccgccaggcacagatcgccgaacttcggcggccggtgtggggaaatccatggtttct

SEQ ID NO: 298 - DNA, 10807 bp, Artificial Sequence
  Zika virus strain H/PF/2013
agttgttgatctgtgtgaatcagactgcgacagttcgagtttgaagcgaaagctagcaacagtatcaacaggttttattttggatttggaaacgagagtttctggtcatgaaaaacccaaaaaagaaatccggaggattccggattgtcaatatgctaaaacgcggagtagcccgtgtgagcccctttgggggcttgaagaggctgccagccggacttctgctgggtcatgggcccatcaggatggtcttggcgattctagcctttttgagattcacggcaatcaagccatcactgggtctcatcaatagatggggttcagtggggaaaaaagaggctatggaaataataaagaagttcaagaaagatctggctgccatgctgagaataatcaatgctaggaaggagaagaagagacgaggcgcagatactagtgtcggaattgttggcctcctgctgaccacagctatggcagcggaggtcactagacgtgggagtgcatactatatgtacttggacagaaacgacgctggggaggccatatcttttccaaccacattggggatgaataagtgttatatacagatcatggatcttggacacatgtgtgatgccaccatgagctatgaatgccctatgctggatgagggggtggaaccagatgacgtcgattgttggtgcaacacgacgtcaacttgggttgtgtacggaacctgccatcacaaaaaaggtgaagcacggagatctagaagagctgtgacgctcccctcccattccactaggaagctgcaaacgcggtcgcaaacctggttggaatcaagagaatacacaaagcacttgattagagtcgaaaattggatattcaggaaccctggcttcgcgttagcagcagctgccatcgcttggcttttgggaagctcaacgagccaaaaagtcatatacttggtcatgatactgctgattgccccggcatacagcatcaggtgcataggagtcagcaatagggactttgtggaaggtatgtcaggtgggacttgggttgatgttgtcttggaacatggaggttgtgtcaccgtaatggcacaggacaaaccgactgtcgacatagagctggttacaacaacagtcagcaacatggcggaggtaagatcctactgctatgaggcatcaatatcggacatggcttcggacagccgctgcccaacacaaggtgaagcctaccttgacaagcaatcagacactcaatatgtctgcaaaagaacgttagtggacagaggctggggaaatggatgtggactttttggcaaagggagcctggtgacatgcgctaagtttgcatgctccaagaaaatgaccgggaagagcatccagccagagaatctggagtaccggataatgctgtcagttcatggctcccagcacagtgggatgatcgttaatgacacaggacatgaaactgatgagaatagagcgaaggttgagataacgcccaattcaccaagagccgaagccaccctggggggttttggaagcctaggacttgattgtgaaccgaggacaggccttgacttttcagatttgtattacttgactatgaataacaagcactggttggttcacaaggagtggttccacgacattccattaccttggcacgctggggcagacaccggaactccacactggaacaacaaagaagcactggtagagttcaaggacgcacatgccaaaaggcaaactgtcgtggttctagggagtcaagaaggagcagttcacacggcccttgctggagctctggaggctgagatggatggtgcaaagggaaggctgtcctctggccacttgaaatgtcgcctgaaaatggataaacttagattgaagggcgtgtcatactccttgtgtaccgcagcgttcacattcaccaagatcccggctgaaacactgcacgggacagtcacagtggaggtacagtacgcagggacagatggaccttgcaaggttccagctcagatggcggtggacatgcaaactctgaccccagttgggaggttgataaccgctaaccccgtaatcactgaaagcactgagaactctaagatgatgctggaacttgatccaccatttggggactcttacattgtcataggagtcggggagaagaagatcacccaccactggcacaggagtggcagcaccattggaaaagcatttgaagccactgtgagaggtgccaagagaatggcagtcttgggagacacagcctgggactttggatcagttggaggcgctctcaactcattgggcaagggcatccatcaaatttttggagcagctttcaaatcattgtttggaggaatgtcctggttctcacaaattctcattggaacgttgctgatgtggttgggtctgaacacaaagaatggatctatttcccttatgtgcttggccttagggggagtgttgatcttcttatccacagctgtctctgctgatgtggggtgctcggtggacttctcaaagaaggagacgagatgcggtacaggggtgttcgtctataacgacgttgaagcctggagggacaggtacaagtaccatcctgactccccccgtagattggcagcagcagtcaagcaagcctgggaagatggtatctgtgggatctcctctgtttcaagaatggaaaacatcatgtggagatcagtagaaggggagctcaacgcaatcctggaagagaatggagttcaactgacggtcgttgtgggatctgtaaaaaaccccatgtggagaggtccacagagattgcccgtgcctgtgaacgagctgccccacggctggaaggcttgggggaaatcgtacttcgtcagagcagcaaagacaaataacagctttgtcgtggatggtgacacactgaaggaatgcccactcaaacatagagcatggaacagctttcttgtggaggatcatgggttcggggtatttcacactagtgtctggctcaaggttagagaagattattcattagagtgtgatccagccgttattggaacagctgttaagggaaaggaggctgtacacagtgatctaggctactggattgagagtgagaagaatgacacatggaggctgaagagggcccatctgatcgagatgaaaacatgtgaatggccaaagtcccacacattgtggacagatggaatagaagagagtgatctgatcatacccaagtctttagctgggccactcagccatcacaataccagagagggctacaggacccaaatgaaagggccatggcacagtgaagagcttgaaattcggtttgaggaatgcccaggcactaaggtccacgtggaggaaacatgtggaacaagaggaccatctctgagatcaaccactgcaagcggaagggtgatcgaggaatggtgctgcagggagtgcacaatgcccccactgtcgttccgggctaaagatggctgttggtatggaatggagataaggcccaggaaagaaccagaaagtaacttagtaaggtcaatggtgactgcaggatcaactgatcacatggatcacttctcccttggagtgcttgtgattctgctcatggtgcaggaagggctgaagaagagaatgaccacaaagatcatcataagcacatcgatggcagtgctggtagctatgatcctgggaggattttcaatgagtgacctggctaagcttgcaattttgatgggtgccaccttcgcggaaatgaacactggaggagatgtagctcatctggcgctgatagcggcattcaaagtcagaccagcgttgctggtatctttcatcttcagagctaattggacaccccgtgaaagcatgctgctggccttggcctcgtgtcttttgcaaactgcgatctccgccttggaaggcgacctgatggttctcatcaatggttttgctttggcctggttggcaatacgagcgatggttgttccacgcactgataacatcaccttggcaatcctggctgctctgacaccactggcccggggcacactgcttgtggcgtggagagcaggccttgctacttgcggggggtttatgctcctctctctgaagggaaaaggcagtgtgaagaagaacttaccatttgtcatggccctgggactaaccgctgtgaggctggtcgaccccatcaacgtggtgggactgctgttgctcacaaggagtgggaagcggagctggccccctagcgaagtactcacagctgttggcctgatatgcgcattggctggagggttcgccaaggcagatatagagatggctgggcccatggccgcggtcggtctgctaattgtcagttacgtggtctcaggaaagagtgtggacatgtacattgaaagagcaggtgacatcacatgggaaaaagatgcggaagtcactggaaacagtccccggctcgatgtggcgctagatgagagtggtgatttctccctggtggaggatgacggtccccccatgagagagatcatactcaaggtggtcctgatgaccatctgtggcatgaacccaatagccataccctttgcagctggagcgtggtacgtatacgtgaagactggaaaaaggagtggtgctctatgggatgtgcctgctcccaaggaagtaaaaaagggggagaccacagatggagtgtacagagtaatgactcgtagactgctaggttcaacacaagttggagtgggagttatgcaagagggggtctttcacactatgtggcacgtcacaaaaggatccgcgctgagaagcggtgaagggagacttgatccatactggggagatgtcaagcaggatctggtgtcatactgtggtccatggaagctagatgccgcctgggacgggcacagcgaggtgcagctcttggccgtgccccccggagagagagcgaggaacatccagactctgcccggaatatttaagacaaaggatggggacattggagcggttgcgctggattacccagcaggaacttcaggatctccaatcctagacaagtgtgggagagtgataggactttatggcaatggggtcgtgatcaaaaatgggagttatgttagtgccatcacccaagggaggagggaggaagagactcctgttgagtgcttcgagccttcgatgctgaagaagaagcagctaactgtcttagacttgcatcctggagctgggaaaaccaggagagttcttcctgaaatagtccgtgaagccataaaaacaagactccgtactgtgatcttagctccaaccagggttgtcgctgctgaaatggaggaagcccttagagggcttccagtgcgttatatgacaacagcagtcaatgtcacccactctggaacagaaatcgtcgacttaatgtgccatgccaccttcacttcacgtctactacagccaatcagagtccccaactataatctgtatattatggatgaggcccacttcacagatccctcaagtatagcagcaagaggatacatttcaacaagggttgagatgggcgaggcggctgccatcttcatgaccgccacgccaccaggaacccgtgacgcatttccggactccaactcaccaattatggacaccgaagtggaagtcccagagagagcctggagctcaggctttgattgggtgacggatcattctggaaaaacagtttggtttgttccaagcgtgaggaacggcaatgagatcgcagcttgtctgacaaaggctggaaaacgggtcatacagctcagcagaaagacttttgagacagagttccagaaaacaaaacatcaagagtgggactttgtcgtgacaactgacatttcagagatgggcgccaactttaaagctgaccgtgtcatagattccaggagatgcctaaagccggtcatacttgatggcgagagagtcattctggctggacccatgcctgtcacacatgccagcgctgcccagaggagggggcgcataggcaggaatcccaacaaacctggagatgagtatctgtatggaggtgggtgcgcagagactgacgaagaccatgcacactggcttgaagcaagaatgctccttgacaatatttacctccaagatggcctcatagcctcgctctatcgacctgaggccgacaaagtagcagccattgagggagagttcaagcttaggacggagcaaaggaagacctttgtggaactcatgaaaagaggagatcttcctgtttggctggcctatcaggttgcatctgccggaataacctacacagatagaagatggtgctttgatggcacgaccaacaacaccataatggaagacagtgtgccggcagaggtgtggaccagacacggagagaaaagagtgctcaaaccgaggtggatggacgccagagtttgttcagatcatgcggccctgaagtcattcaaggagtttgccgctgggaaaagaggagcggcttttggagtgatggaagccctgggaacactgccaggacacatgacagagagattccaggaagccattgacaacctcgctgtgctcatgcgggcagagactggaagcaggccttacaaagccgcggcggcccaattgccggagaccctagagaccattatgcttttggggttgctgggaacagtctcgctgggaatctttttcgtcttgatgaggaacaagggcatagggaagatgggctttggaatggtgactcttggggccagcgcatggctcatgtggctctcggaaattgagccagccagaattgcatgtgtcctcattgttgtgttcctattgctggtggtgctcatacctgagccagaaaagcaaagatctccccaggacaaccaaatggcaatcatcatcatggtagcagtaggtcttctgggcttgattaccgccaatgaactcggatggttggagagaacaaagagtgacctaagccatctaatgggaaggagagaggagggggcaaccataggattctcaatggacattgacctgcggccagcctcagcttgggccatctatgctgccttgacaactttcattaccccagccgtccaacatgcagtgaccacttcatacaacaactactccttaatggcgatggccacgcaagctggagtgttgtttggtatgggcaaagggatgccattctacgcatgggactttggagtcccgctgctaatgataggttgctactcacaattaacacccctgaccctaatagtggccatcattttgctcgtggcgcactacatgtacttgatcccagggctgcaggcagcagctgcgcgtgctgcccagaagagaacggcagctggcatcatgaagaaccctgttgtggatggaatagtggtgactgacattgacacaatgacaattgacccccaagtggagaaaaagatgggacaggtgctactcatagcagtagccgtctccagcgccatactgtcgcggaccgcctgggggtggggggaggctggggccctgatcacagcggcaacttccactttgtgggaaggctctccgaacaagtactggaactcctctacagccacttcactgtgtaacatttttaggggaagttacttggctggagcttctctaatctacacagtaacaagaaacgctggcttggtcaagagacgtgggggtggaacaggagagaccctgggagagaaatggaaggcccgcttgaaccagatgtcggccctggagttctactcctacaaaaagtcaggcatcaccgaggtgtgcagagaagaggcccgccgcgccctcaaggacggtgtggcaacgggaggccatgctgtgtcccgaggaagtgcaaagctgagatggttggtggagcggggatacctgcagccctatggaaaggtcattgatcttggatgtggcagagggggctggagttactacgccgccaccatccgcaaagttcaagaagtgaaaggatacacaaaaggaggccctggtcatgaagaacccatgttggtgcaaagctatgggtggaacatagtccgtcttaagagtggggtggacgtctttcatatggcggctgagccgtgtgacacgttgctgtgtgacataggtgagtcatcatctagtcctgaagtggaagaagcacggacgctcagagtcctctccatggtgggggattggcttgaaaaaagaccaggagccttttgtataaaagtgttgtgcccatacaccagcactatgatggaaaccctggagcgactgcagcgtaggtatgggggaggactggtcagagtgccactctcccgcaactctacacatgagatgtactgggtctctggagcgaaaagcaacaccataaaaagtgtgtccaccacgagccagctcctcttggggcgcatggacgggcccaggaggccagtgaaatatgaggaggatgtgaatctcggctctggcacgcgggctgtggtaagctgcgctgaagctcccaacatgaagatcattggtaaccgcattgaaaggatccgcagtgagcacgcggaaacgtggttctttgacgagaaccacccatataggacatgggcttaccatggaagctatgaggcccccacacaagggtcagcgtcctctctaataaacggggttgtcaggctcctgtcaaaaccctgggatgtggtgactggagtcacaggaatagccatgaccgacaccacaccgtatggtcagcaaagagttttcaaggaaaaagtggacactagggtgccagacccccaagaaggcactcgtcaggttatgagcatggtctcttcctggttgtggaaagagctaggcaaacacaaacggccacgagtctgtaccaaagaagagttcatcaacaaggttcgtagcaatgcagcattaggggcaatatttgaagaggaaaaagagtggaagactgcagtggaagctgtgaacgatccaaggttctgggctctagtggacaaggaaagagagcaccacctgagaggagagtgccagagttgtgtgtacaacatgatgggaaaaagagaaaagaaacaaggggaatttggaaaggccaagggcagccgcgccatctggtatatgtggctaggggctagatttctagagttcgaagcccttggattcttgaacgaggatcactggatggggagagagaactcaggaggtggtgttgaagggctgggattacaaagactcggatatgtcctagaagagatgagtcgcataccaggaggaaggatgtatgcagatgacactgctggctgggacacccgcatcagcaggtttgatctggagaatgaagctctaatcaccaaccaaatggagaaagggcacagggccttggcattggccataatcaagtacacataccaaaacaaagtggtaaaggtccttagaccagctgaaaaagggaagacagttatggacattatttcgagacaagaccaaagggggagcggacaagttgtcacttacgctcttaacacatttaccaacctagtggtgcaactcattcggaatatggaggctgaggaagttctagagatgcaagacttgtggctgctgcggaggtcagagaaagtgaccaactggttgcagagcaacggatgggataggctcaaacgaatggcagtcagtggagatgattgcgttgtgaagccaattgatgataggtttgcacatgccctcaggttcttgaatgatatgggaaaagttaggaaggacacacaagagtggaaaccctcaactggatgggacaactgggaagaagttccgttttgctcccaccacttcaacaagctccatctcaaggacgggaggtccattgtggttccctgccgccaccaagatgaactgattggccgggcccgcgtctctccaggggcgggatggagcatccgggagactgcttgcctagcaaaatcatatgcgcaaatgtggcagctcctttatttccacagaagggacctccgactgatggccaatgccatttgttcatctgtgccagttgactgggttccaactgggagaactacctggtcaatccatggaaagggagaatggatgaccactgaagacatgcttgtggtgtggaacagagtgtggattgaggagaacgaccacatggaagacaagaccccagttacgaaatggacagacattccctatttgggaaaaagggaagacttgtggtgtggatctctcatagggcacagaccgcgcaccacctgggctgagaacattaaaaacacagtcaacatggtgcgcaggatcataggtgatgaagaaaagtacatggactacctatccacccaagttcgctacttgggtgaagaagggtctacacctggagtgctgtaagcaccaatcttagtgttgtcaggcctgctagtcagccacagcttggggaaagctgtgcagcctgtgacccccccaggagaagctgggaaaccaagcctatagtcaggccgagaacgccatggcacggaagaagccatgctgcctgtgagcccctcagaggacactgagtcaaaaaaccccacgcgcttggaggcgcaggatgggaaaagaaggtggcgaccttccccacccttcaatctggggcctgaactggagatcagctgtggatctccagaagagggactagtggttagaggagaccccccggaaaacgcaaaacagcatattgacgctgggaaagaccagagactccatgagtttccaccacgctggccgccaggcacagatcgccgaatagcggcggccggtgtggggaaatccatgggtct

SEQ ID NO: 299 - DNA, 10807 bp, Artificial Sequence
  Zika virus strain PRVABC-59
agttgttgatctgtgtgaatcagactgcgacagttcgagtttgaagcgaaagctagcaacagtatcaacaggttttattttggatttggaaacgagagtttctggtcatgaaaaacccaaaaaagaaatccggaggattccggattgtcaatatgctaaaacgcggagtagcccgtgtgagcccctttgggggcttgaagaggctgccagccggacttctgctgggtcatgggcccatcaggatggtcttggcgattctagcctttttgagattcacggcaatcaagccatcactgggtctcatcaatagatggggttcagtggggaaaaaagaggctatggaaacaataaagaagttcaagaaagatctggctgccatgctgagaataatcaatgctaggaaggagaagaagagacgaggcgcagatactagtgtcggaattgttggcctcctgctgaccacagctatggcagcggaggtcactagacgtgggagtgcatactatatgtacttggacagaaacgatgctggggaggccatatcttttccaaccacattggggatgaataagtgttatatacagatcatggatcttggacacatgtgtgatgccaccatgagctatgaatgccctatgctggatgagggggtggaaccagatgacgtcgattgttggtgcaacacgacgtcaacttgggttgtgtacggaacctgccatcacaaaaaaggtgaagcacggagatctagaagagctgtgacgctcccctcccattccaccaggaagctgcaaacgcggtcgcaaacctggttggaatcaagagaatacacaaagcacttgattagagtcgaaaattggatattcaggaaccctggcttcgcgttagcagcagctgccatcgcttggcttttgggaagctcaacgagccaaaaagtcatatacttggtcatgatactgctgattgccccggcatacagcatcaggtgcataggagtcagcaatagggactttgtggaaggtatgtcaggtgggacttgggttgatgttgtcttggaacatggaggttgtgtcaccgtaatggcacaggacaaaccgactgtcgacatagagctggttacaacaacagtcagcaacatggcggaggtaagatcctactgctatgaggcatcaatatcagacatggcttctgacagccgctgcccaacacaaggtgaagcctaccttgacaagcaatcagacactcaatatgtctgcaaaagaacgttagtggacagaggctggggaaatggatgtggactttttggcaaagggagcctggtgacatgcgctaagtttgcatgctccaagaaaatgaccgggaagagcatccagccagagaatctggagtaccggataatgctgtcagttcatggctcccagcacagtgggatgatcgttaatgacacaggacatgaaactgatgagaatagagcgaaagttgagataacgcccaattcaccgagagccgaagccaccctggggggttttggaagcctaggacttgattgtgaaccgaggacaggccttgacttttcagatttgtattacttgactatgaataacaagcactggttggttcacaaggagtggttccacgacattccattaccttggcacgctggggcagacaccggaactccacactggaacaacaaagaagcactggtagagttcaaggacgcacatgccaaaaggcaaactgtcgtggttctagggagtcaagaaggagcagttcacacggcccttgctggagctctggaggctgagatggatggtgcaaagggaaggctgtcctctggccacttgaaatgtcgcctgaaaatggataaacttagattgaagggcgtgtcatactccttgtgtactgcagcgttcacattcaccaagatcccggctgaaacactgcacgggacagtcacagtggaggtacagtacgcagggacagatggaccttgcaaggttccagctcagatggcggtggacatgcaaactctgaccccagttgggaggttgataaccgctaaccccgtaatcactgaaagcactgagaactctaagatgatgctggaacttgatccaccatttggggactcttacattgtcataggagtcggggagaagaagatcacccaccactggcacaggagtggcagcaccattggaaaagcatttgaagccactgtgagaggtgccaagagaatggcagtcttgggagacacagcctgggactttggatcagttggaggcgctctcaactcattgggcaagggcatccatcaaatttttggagcagctttcaaatcattgtttggaggaatgtcctggttctcacaaattctcattggaacgttgctgatgtggttgggtctgaacacaaagaatggatctatttcccttatgtgcttggccttagggggagtgttgatcttcttatccacagccgtctctgctgatgtggggtgctcggtggacttctcaaagaaggagacgagatgcggtacaggggtgttcgtctataacgacgttgaagcctggagggacaggtacaagtaccatcctgactccccccgtagattggcagcagcagtcaagcaagcctgggaagatggtatctgcgggatctcctctgtttcaagaatggaaaacatcatgtggagatcagtagaaggggagctcaacgcaatcctggaagagaatggagttcaactgacggtcgttgtgggatctgtaaaaaaccccatggggagaggtccacagagattgcccgtgcctgtgaacgagctgccccacggctggaaggcttgggggaaatcgtatttcgtcagagcagcaaagacaaataacagctttgtcgtggatggtgacacactgaaggaatgcccactcaaacatagagcatggaacagctttcttgtggaggatcatgggttcggggtatttcacactagtgtctggctcaaggttagagaagattattcattagagtgtgatccagccgttattggaacagctgttaagggaaaggaggctgtacacagtgatctaggctactggattgagagtgagaagaatgacacatggaggctgaagagggcccatctgatcgagatgaaaacatgtgaatggccaaagtcccacacattgtggacagatggaatagaagagagtgatctgatcatacccaagtctttagctgggccactcagccatcacaataccagagagggctacaggacccaaatgaaagggccatggcacagtgaagagcttgaaattcggtttgaggaatgcccaggcactaaggtccacgtggaggaaacatgtggaacaagaggaccatctctgagatcaaccactgcaagcggaagggtgatcgaggaatggtgctgcagggagtgcacaatgcccccactgtcgttccgggctaaagatggctgttggtatggaatggagataaggcccaggaaagaaccagaaagcaacttagtaaggtcaatggtgactgcaggatcaactgatcacatggaccacttctcccttggagtgcttgtgatcctgctcatggtgcaggaagggctgaagaagagaatgaccacaaagatcatcataagcacatcaatggcagtgctggtagctatgatcctgggaggattttcaatgagtgacctggctaagcttgcaattttgatgggtgccaccttcgcggaaatgaacactggaggagatgtagctcatctggcgctgatagcggcattcaaagtcagaccagcgttgctggtatctttcatcttcagagctaattggacaccccgtgaaagcatgctgctggccttggcctcgtgtcttttgcaaactgcgatctccgccttggaaggcgacctgatggttctcatcaatggttttgctttggcctggttggcaatacgagcgatggttgttccacgcactgataacatcaccttggcaatcctggctgctctgacaccactggcccggggcacactgcttgtggcgtggagagcaggccttgctacttgcggggggtttatgctcctctctctgaagggaaaaggcagtgtgaagaagaacttaccatttgtcatggccctgggactaaccgctgtgaggctggtcgaccccatcaacgtggtgggactgctgttgctcacaaggagtgggaagcggagctggccccctagcgaagtactcacagctgttggcctgatatgcgcattggctggagggttcgccaaggcagatatagagatggctgggcccatggccgcggtcggtctgctaattgtcagttacgtggtctcaggaaagagtgtggacatgtacattgaaagagcaggtgacatcacatgggaaaaagatgcggaagtcactggaaacagtccccggctcgatgtggcgctagatgagagtggtgatttctccctggtggaggatgacggtccccccatgagagagatcatactcaaggtggtcctgatgaccatctgtggcatgaacccaatagccataccctttgcagctggagcgtggtacgtatacgtgaagactggaaaaaggagtggtgctctatgggatgtgcctgctcccaaggaagtaaaaaagggggagaccacagatggagtgtacagagtaatgactcgtagactgctaggttcaacacaagttggagtgggagttatgcaagagggggtctttcacactatgtggcacgtcacaaaaggatccgcgctgagaagcggtgaagggagacttgatccatactggggagatgtcaagcaggatctggtgtcatactgtggtccatggaagctagatgccgcctgggatgggcacagcgaggtgcagctcttggccgtgccccccggagagagagcgaggaacatccagactctgcccggaatatttaagacaaaggatggggacattggagcggttgcgctggattacccagcaggaacttcaggatctccaatcctagacaagtgtgggagagtgataggactttatggcaatggggtcgtgatcaaaaacgggagttatgttagtgccatcacccaagggaggagggaggaagagactcctgttgagtgcttcgagccctcgatgctgaagaagaagcagctaactgtcttagacttgcatcctggagctgggaaaaccaggagagttcttcctgaaatagtccgtgaagccataaaaacaagactccgtactgtgatcttagctccaaccagggttgtcgctgctgaaatggaggaggcccttagagggcttccagtgcgttatatgacaacagcagtcaatgtcacccactctggaacagaaatcgtcgacttaatgtgccatgccaccttcacttcacgtctactacagccaatcagagtccccaactataatctgtatattatggatgaggcccacttcacagatccctcaagtatagcagcaagaggatacatttcaacaagggttgagatgggcgaggcggctgccatcttcatgaccgccacgccaccaggaacccgtgacgcatttccggactccaactcaccaattatggacaccgaagtggaagtcccagagagagcctggagctcaggctttgattgggtgacggatcattctggaaaaacagtttggtttgttccaagcgtgaggaacggcaatgagatcgcagcttgtctgacaaaggctggaaaacgggtcatacagctcagcagaaagacttttgagacagagttccagaaaacaaaacatcaagagtgggactttgtcgtgacaactgacatttcagagatgggcgccaactttaaagctgaccgtgtcatagattccaggagatgcctaaagccggtcatacttgatggcgagagagtcattctggctggacccatgcctgtcacacatgccagcgctgcccagaggagggggcgcataggcaggaatcccaacaaacctggagatgagtatctgtatggaggtgggtgcgcagagactgacgaagaccatgcacactggcttgaagcaagaatgctccttgacaatatttacctccaagatggcctcatagcctcgctctatcgacctgaggccgacaaagtagcagccattgagggagagttcaagcttaggacggagcaaaggaagacctttgtggaactcatgaaaagaggagatcttcctgtttggctggcctatcaggttgcatctgccggaataacctacacagatagaagatggtgctttgatggcacgaccaacaacaccataatggaagacagtgtgccggcagaggtgtggaccagacacggagagaaaagagtgctcaaaccgaggtggatggacgccagagtttgttcagatcatgcggccctgaagtcattcaaggagtttgccgctgggaaaagaggagcggcttttggagtgatggaagccctgggaacactgccaggacacatgacagagagattccaggaagccattgacaacctcgctgtgctcatgcgggcagagactggaagcaggccttacaaagccgcggcggcccaattgccggagaccctagagaccataatgcttttggggttgctgggaacagtctcgctgggaatcttcttcgtcttgatgaggaacaagggcatagggaagatgggctttggaatggtgactcttggggccagcgcatggctcatgtggctctcggaaattgagccagccagaattgcatgtgtcctcattgttgtgttcctattgctggtggtgctcatacctgagccagaaaagcaaagatctccccaggacaaccaaatggcaatcatcatcatggtagcagtaggtcttctgggcttgattaccgccaatgaactcggatggttggagagaacaaagagtgacctaagccatctaatgggaaggagagaggagggggcaaccataggattctcaatggacattgacctgcggccagcctcagcttgggccatctatgctgccttgacaactttcattaccccagccgtccaacatgcagtgaccacctcatacaacaactactccttaatggcgatggccacgcaagctggagtgttgtttggcatgggcaaagggatgccattctacgcatgggactttggagtcccgctgctaatgataggttgctactcacaattaacacccctgaccctaatagtggccatcattttgctcgtggcgcactacatgtacttgatcccagggctgcaggcagcagctgcgcgtgctgcccagaagagaacggcagctggcatcatgaagaaccctgttgtggatggaatagtggtgactgacattgacacaatgacaattgacccccaagtggagaaaaagatgggacaggtgctactcatagcagtagccgtctccagcgccatactgtcgcggaccgcctgggggtggggggaggctggggctctgatcacagccgcaacttccactttgtgggaaggctctccgaacaagtactggaactcctctacagccacttcactgtgtaacatttttaggggaagttacttggctggagcttctctaatctacacagtaacaagaaacgctggcttggtcaagagacgtgggggtggaacaggagagaccctgggagagaaatggaaggcccgcttgaaccagatgtcggccctggagttctactcctacaaaaagtcaggcatcaccgaggtgtgcagagaagaggcccgccgcgccctcaaggacggtgtggcaacgggaggccatgctgtgtcccgaggaagtgcaaagctgagatggttggtggagcggggatacctgcagccctatggaaaggtcattgatcttggatgtggcagagggggctggagttactacgtcgccaccatccgcaaagttcaagaagtgaaaggatacacaaaaggaggccctggtcatgaagaacccgtgttggtgcaaagctatgggtggaacatagtccgtcttaagagtggggtggacgtctttcatatggcggctgagccgtgtgacacgttgctgtgtgacataggtgagtcatcatctagtcctgaagtggaagaagcacggacgctcagagtcctctccatggtgggggattggcttgaaaaaagaccaggagccttttgtataaaagtgttgtgcccatacaccagcactatgatggaaaccctggagcgactgcagcgtaggtatgggggaggattggtcagagtgccactctcccgcaactctacacatgagatgtactgggtctctggagcgaaaagcaacaccataaaaagtgtgtccaccacgagccagctcctcttggggcgcatggacgggcctaggaggccagtgaaatatgaggaggatgtgaatctcggctctggcacgcgggctgtggtaagctgcgctgaagctcccaacatgaagatcattggtaaccgcattgaaaggatccgcagtgagcacgcggaaacgtggttctttgacgagaaccacccatataggacatgggcttaccatggaagctatgaggcccccacacaagggtcagcgtcctctctaataaacggggttgtcaggctcctgtcaaaaccctgggatgtggtgactggagtcacaggaatagccatgaccgacaccacaccgtatggtcagcaaagagttttcaaggaaaaagtggacactagggtgccagacccccaagaaggcactcgtcaggttatgagcatggtctcttcctggttgtggaaagagctaggcaaacacaaacggccacgagtctgcaccaaagaagagttcatcaacaaggttcgtagcaatgcagcattaggggcaatatttgaagaggaaaaagagtggaagactgcagtggaagctgtgaacgatccaaggttctgggctctagtggacaaggaaagagagcaccacctgagaggagagtgccagagctgtgtgtacaacatgatgggaaaaagagaaaagaaacaaggggaatttggaaaggccaagggcagccgcgccatctggtatatgtggctaggggctagatttctagagttcgaagcccttggattcttgaacgaggatcactggatggggagagagaactcaggaggtggtgttgaagggctgggattacaaagactcggatatgtcctagaagagatgagtcgtataccaggaggaaggatgtatgcagatgacactgctggctgggacacccgcattagcaggtttgatctggagaatgaagctctaatcaccaaccaaatggagaaagggcacagggccttggcattggccataatcaagtacacataccaaaacaaagtggtaaaggtccttagaccagctgaaaaagggaaaacagttatggacattatttcgagacaagaccaaagggggagcggacaagttgtcacttacgctcttaacacatttaccaacctagtggtgcaactcattcggaatatggaggctgaggaagttctagagatgcaagacttgtggctgctgcggaggtcagagaaagtgaccaactggttgcagagcaacggatgggataggctcaaacgaatggcagtcagtggagatgattgcgttgtgaagccaattgatgataggtttgcacatgccctcaggttcttgaatgatatgggaaaagttaggaaggacacacaagagtggaaaccctcaactggatgggacaactgggaagaagttccgttttgctcccaccacttcaacaagctccatctcaaggacgggaggtccattgtggttccctgccgccaccaagatgaactgattggccgggcccgcgtctctccaggggcgggatggagcatccgggagactgcttgcctagcaaaatcatatgcgcaaatgtggcagctcctttatttccacagaagggacctccgactgatggccaatgccatttgttcatctgtgccagttgactgggttccaactgggagaactacctggtcaatccatggaaagggagaatggatgaccactgaagacatgcttgtggtgtggaacagagtgtggattgaggagaacgaccacatggaagacaagaccccagttacgaaatggacagacattccctatttgggaaaaagggaagacttgtggtgtggatctctcatagggcacagaccgcgcaccacctgggctgagaacattaaaaacacagtcaacatggtgcgcaggatcataggtgatgaagaaaagtacatggactacctatccacccaagttcgctacttgggtgaagaagggtctacacctggagtgctgtaagcaccaatcttaatgttgtcaggcctgctagtcagccacagcttggggaaagctgtgcagcctgtgacccccccaggagaagctgggaaaccaagcctatagtcaggccgagaacgccatggcacggaagaagccatgctgcctgtgagcccctcagaggacactgagtcaaaaaaccccacgcgcttggaggcgcaggatgggaaaagaaggtggcgaccttccccacccttcaatctggggcctgaactggagatcagctgtggatctccagaagagggactagtggttagaggagaccccccggaaaacgcaaaacagcatattgacgctgggaaagaccagagactccatgagtttccaccacgctggccgccaggcacagatcgccgaatagcggcggccggtgtggggaaatccatgggtct

SEQ ID NO: 300 - DNA, 9678 bp, Artificial Sequence
  Hepatitis C virus strain JFH-1
acctgcccctaataggggcgacactccgccatgaatcactcccctgtgaggaactactgtcttcacgcagaaagcgcctagccatggcgttagtatgagtgtcgtacagcctccaggcccccccctcccgggagagccatagtggtctgcggaaccggtgagtacaccggaattgccgggaagactgggtcctttcttggataaacccactctatgcccggccatttgggcgtgcccccgcaagactgctagccgagtagcgttgggttgcgaaaggccttgtggtactgcctgatagggcgcttgcgagtgccccgggaggtctcgtagaccgtgcaccatgagcacaaatcctaaacctcaaagaaaaaccaaaagaaacaccaaccgtcgcccagaagacgttaagttcccgggcggcggccagatcgttggcggagtatacttgttgccgcgcaggggccccaggttgggtgtgcgcacgacaaggaaaacttcggagcggtcccagccacgtgggagacgccagcccatccccaaagatcggcgctccactggcaaggcctggggaaaaccaggtcgcccctggcccctatatgggaatgagggactcggctgggcaggatggctcctgtccccccgaggctctcgcccctcctggggccccactgacccccggcataggtcgcgcaacgtgggtaaagtcatcgacaccctaacgtgtggctttgccgacctcatggggtacatccccgtcgtaggcgccccgcttagtggcgccgccagagctgtcgcgcacggcgtgagagtcctggaggacggggttaattatgcaacagggaacctacccggtttccccttttctatcttcttgctggccctgttgtcctgcatcaccgttccggtctctgctgcccaggtgaagaataccagtagcagctacatggtgaccaatgactgctccaatgacagcatcacttggcagctcgaggctgcggttctccacgtccccgggtgcgtcccgtgcgagagagtggggaatacgtcacggtgttgggtgccagtctcgccaaacatggctgtgcggcagcccggtgccctcacgcagggtctgcggacgcacatcgatatggttgtgatgtccgccaccttctgctctgctctctacgtgggggacctctgtggcggggtgatgctcgcggcccaggtgttcatcgtctcgccgcagtaccactggtttgtgcaagaatgcaattgctccatctaccctggcaccatcactggacaccgcatggcatgggacatgatgatgaactggtcgcccacggccaccatgatcctggcgtacgtgatgcgcgtccccgaggtcatcatagacatcgttagcggggctcactggggcgtcatgttcggcttggcctacttctctatgcagggagcgtgggcgaaggtcattgtcatccttctgctggccgctggggtggacgcgggcaccaccaccgttggaggcgctgttgcacgttccaccaacgtgattgccggcgtgttcagccatggccctcagcagaacattcagctcattaacaccaacggcagttggcacatcaaccgtactgccttgaattgcaatgactccttgaacaccggctttctcgcggccttgttctacaccaaccgctttaactcgtcagggtgtccagggcgcctgtccgcctgccgcaacatcgaggctttccggatagggtggggcaccctacagtacgaggataatgtcaccaatccagaggatatgaggccgtactgctggcactaccccccaaagccgtgtggcgtagtccccgcgaggtctgtgtgtggcccagtgtactgtttcacccccagcccggtagtagtgggcacgaccgacagacgtggagtgcccacctacacatggggagagaatgagacagatgtcttcctactgaacagcacccgaccgccgcagggctcatggttcggctgcacgtggatgaactccactggtttcaccaagacttgtggcgcgccaccttgccgcaccagagctgacttcaacgccagcacggacttgttgtgccctacggattgttttaggaagcatcctgatgccacttatattaagtgtggttctgggccctggctcacaccaaagtgcctggtccactacccttacagactctggcattacccctgcacagtcaattttaccatcttcaagataagaatgtatgtagggggggttgagcacaggctcacggccgcatgcaacttcactcgtggggatcgctgcgacttggaggacagggacaggagtcagctgtctcctctgttgcactctaccacggaatgggccatcctgccctgcacctactcagacttacccgctttgtcaactggtcttctccaccttcaccagaacatcgtggacgtacaatacatgtatggcctctcacctgctatcacaaaatacgtcgttcgatgggagtgggtggtactcttattcctgctcttagcggacgccagagtctgcgcctgcttgtggatgctcatcttgttgggccaggccgaagcagcattggagaagttggtcgtcttgcacgctgcgagtgcggctaactgccatggcctcctatattttgccatcttcttcgtggcagcttggcacatcaggggtcgggtggtccccttgaccacctattgcctcactggcctatggcccttctgcctactgctcatggcactgccccggcaggcttatgcctatgacgcacctgtgcacggacagataggcgtgggtttgttgatattgatcaccctcttcacactcaccccggggtataagaccctcctcggccagtgtctgtggtggttgtgctatctcctgaccctgggggaagccatgattcaggagtgggtaccacccatgcaggtgcgcggcggccgcgatggcatcgcgtgggccgtcactatattctgcccgggtgtggtgtttgacattaccaaatggcttttggcgttgcttgggcctgcttacctcttaagggccgctttgacacatgtgccgtacttcgtcagagctcacgctctgataagggtatgcgctttggtgaagcagctcgcggggggtaggtatgttcaggtggcgctattggcccttggcaggtggactggcacctacatctatgaccacctcacacctatgtcggactgggccgctagcggcctgcgcgacttagcggtcgccgtggaacccatcatcttcagtccgatggagaagaaggtcatcgtctggggagcggagacggctgcatgtggggacattctacatggacttcccgtgtccgcccgactcggccaggagatcctcctcggcccagctgatggctacacctccaaggggtggaagctccttgctcccatcactgcttatgcccagcaaacacgaggcctcctgggcgccatagtggtgagtatgacggggcgtgacaggacagaacaggccggggaagtccaaatcctgtccacagtctctcagtccttcctcggaacaaccatctcgggggttttgtggactgtttaccacggagctggcaacaagactctagccggcttacggggtccggtcacgcagatgtactcgagtgctgagggggacttggtaggctggcccagcccccctgggaccaagtctttggagccgtgcaagtgtggagccgtcgacctatatctggtcacgcggaacgctgatgtcatcccggctcggagacgcggggacaagcggggagcattgctctccccgagacccatttcgaccttgaaggggtcctcgggggggccggtgctctgccctaggggccacgtcgttgggctcttccgagcagctgtgtgctctcggggcgtggccaaatccatcgatttcatccccgttgagacactcgacgttgttacaaggtctcccactttcagtgacaacagcacgccaccggctgtgccccagacctatcaggtcgggtacttgcatgctccaactggcagtggaaagagcaccaaggtccctgtcgcgtatgccgcccaggggtacaaagtactagtgcttaacccctcggtagctgccaccctggggtttggggcgtacctatccaaggcacatggcatcaatcccaacattaggactggagtcaggaccgtgatgaccggggaggccatcacgtactccacatatggcaaatttctcgccgatgggggctgcgctagcggcgcctatgacatcatcatatgcgatgaatgccacgctgtggatgctacctccattctcggcatcggaacggtccttgatcaagcagagacagccggggtcagactaactgtgctggctacggccacaccccccgggtcagtgacaaccccccatcccgatatagaagaggtaggcctcgggcgggagggtgagatccccttctatgggagggcgattcccctatcctgcatcaagggagggagacacctgattttctgccactcaaagaaaaagtgtgacgagctcgcggcggcccttcggggcatgggcttgaatgccgtggcatactatagagggttggacgtctccataataccagctcagggagatgtggtggtcgtcgccaccgacgccctcatgacggggtacactggagactttgactccgtgatcgactgcaatgtagcggtcacccaagctgtcgacttcagcctggaccccaccttcactataaccacacagactgtcccacaagacgctgtctcacgcagtcagcgccgcgggcgcacaggtagaggaagacagggcacttataggtatgtttccactggtgaacgagcctcaggaatgtttgacagtgtagtgctttgtgagtgctacgacgcaggggctgcgtggtacgatctcacaccagcggagaccaccgtcaggcttagagcgtatttcaacacgcccggcctacccgtgtgtcaagaccatcttgaattttgggaggcagttttcaccggcctcacacacatagacgcccacttcctctcccaaacaaagcaagcgggggagaacttcgcgtacctagtagcctaccaagctacggtgtgcgccagagccaaggcccctcccccgtcctgggacgccatgtggaagtgcctggcccgactcaagcctacgcttgcgggccccacacctctcctgtaccgtttgggccctattaccaatgaggtcaccctcacacaccctgggacgaagtacatcgccacatgcatgcaagctgaccttgaggtcatgaccagcacgtgggtcctagctggaggagtcctggcagccgtcgccgcatattgcctggcgactggatgcgtttccatcatcggccgcttgcacgtcaaccagcgagtcgtcgttgcgccggataaggaggtcctgtatgaggcttttgatgagatggaggaatgcgcctctagggcggctctcatcgaagaggggcagcggatagccgagatgttgaagtccaagatccaaggcttgctgcagcaggcctctaagcaggcccaggacatacaacccgctatgcaggcttcatggcccaaagtggaacaattttgggccagacacatgtggaacttcattagcggcatccaatacctcgcaggattgtcaacactgccagggaaccccgcggtggcttccatgatggcattcagtgccgccctcaccagtccgttgtcgaccagtaccaccatccttctcaacatcatgggaggctggttagcgtcccagatcgcaccacccgcgggggccaccggctttgtcgtcagtggcctggtgggggctgccgtgggcagcataggcctgggtaaggtgctggtggacatcctggcaggatatggtgcgggcatttcgggggccctcgtcgcattcaagatcatgtctggcgagaagccctctatggaagatgtcatcaatctactgcctgggatcctgtctccgggagccctggtggtgggggtcatctgcgcggccattctgcgccgccacgtgggaccgggggagggcgcggtccaatggatgaacaggcttattgcctttgcttccagaggaaaccacgtcgcccctactcactacgtgacggagtcggatgcgtcgcagcgtgtgacccaactacttggctctcttactataaccagcctactcagaagactccacaattggataactgaggactgccccatcccatgctccggatcctggctccgcgacgtgtgggactgggtttgcaccatcttgacagacttcaaaaattggctgacctctaaattgttccccaagctgcccggcctccccttcatctcttgtcaaaaggggtacaagggtgtgtgggccggcactggcatcatgaccacgcgctgcccttgcggcgccaacatctctggcaatgtccgcctgggctctatgaggatcacagggcctaaaacctgcatgaacacctggcaggggacctttcctatcaattgctacacggagggccagtgcgcgccgaaaccccccacgaactacaagaccgccatctggagggtggcggcctcggagtacgcggaggtgacgcagcatgggtcgtactcctatgtaacaggactgaccactgacaatctgaaaattccttgccaactaccttctccagagtttttctcctgggtggacggtgtgcagatccataggtttgcacccacaccaaagccgtttttccgggatgaggtctcgttctgcgttgggcttaattcctatgctgtcgggtcccagcttccctgtgaacctgagcccgacgcagacgtattgaggtccatgctaacagatccgccccacatcacggcggagactgcggcgcggcgcttggcacggggatcacctccatctgaggcgagctcctcagtgagccagctatcagcaccgtcgctgcgggccacctgcaccacccacagcaacacctatgacgtggacatggtcgatgccaacctgctcatggagggcggtgtggctcagacagagcctgagtccagggtgcccgttctggactttctcgagccaatggccgaggaagagagcgaccttgagccctcaataccatcggagtgcatgctccccaggagcgggtttccacgggccttaccggcttgggcacggcctgactacaacccgccgctcgtggaatcgtggaggaggccagattaccaaccgcccaccgttgctggttgtgctctccccccccccaagaaggccccgacgcctcccccaaggagacgccggacagtgggtctgagcgagagcaccatatcagaagccctccagcaactggccatcaagacctttggccagcccccctcgagcggtgatgcaggctcgtccacgggggcgggcgccgccgaatccggcggtccgacgtcccctggtgagccggccccctcagagacaggttccgcctcctctatgccccccctcgagggggagcctggagatccggacctggagtctgatcaggtagagcttcaacctcccccccagggggggggggtagctcccggttcgggctcggggtcttggtctacttgctccgaggaggacgataccaccgtgtgctgctccatgtcatactcctggaccggggctctaataactccctgtagccccgaagaggaaaagttgccaatcaaccctttgagtaactcgctgttgcgataccataacaaggtgtactgtacaacatcaaagagcgcctcacagagggctaaaaaggtaacttttgacaggacgcaagtgctcgacgcccattatgactcagtcttaaaggacatcaagctagcggcttccaaggtcagcgcaaggctcctcaccttggaggaggcgtgccagttgactccaccccattctgcaagatccaagtatggattcggggccaaggaggtccgcagcttgtccgggagggccgttaaccacatcaagtccgtgtggaaggacctcctggaagacccacaaacaccaattcccacaaccatcatggccaaaaatgaggtgttctgcgtggaccccgccaaggggggtaagaaaccagctcgcctcatcgtttaccctgacctcggcgtccgggtctgcgagaaaatggccctctatgacattacacaaaagcttcctcaggcggtaatgggagcttcctatggcttccagtactcccctgcccaacgggtggagtatctcttgaaagcatgggcggaaaagaaggaccccatgggtttttcgtatgatacccgatgcttcgactcaaccgtcactgagagagacatcaggaccgaggagtccatataccaggcctgctccctgcccgaggaggcccgcactgccatacactcgctgactgagagactttacgtaggagggcccatgttcaacagcaagggtcaaacctgcggttacagacgttgccgcgccagcggggtgctaaccactagcatgggtaacaccatcacatgctatgtgaaagccctagcggcctgcaaggctgcggggatagttgcgcccacaatgctggtatgcggcgatgacctagtagtcatctcagaaagccaggggactgaggaggacgagcggaacctgagagccttcacggaggccatgaccaggtactctgcccctcctggtgatccccccagaccggaatatgacctggagctaataacatcctgttcctcaaatgtgtctgtggcgttgggcccgcggggccgccgcagatactacctgaccagagacccaaccactccactcgcccgggctgcctgggaaacagttagacactcccctatcaattcatggctgggaaacatcatccagtatgctccaaccatatgggttcgcatggtcctaatgacacacttcttctccattctcatggtccaagacaccctggaccagaacctcaactttgagatgtatggatcagtatactccgtgaatcctttggaccttccagccataattgagaggttacacgggcttgacgccttttctatgcacacatactctcaccacgaactgacgcgggtggcttcagccctcagaaaacttggggcgccacccctcagggtgtggaagagtcgggctcgcgcagtcagggcgtccctcatctcccgtggagggaaagcggccgtttgcggccgatatctcttcaattgggcggtgaagaccaagctcaaactcactccattgccggaggcgcgcctactggacttatccagttggttcaccgtcggcgccggcgggggcgacatttttcacagcgtgtcgcgcgcccgaccccgctcattactcttcggcctactcctacttttcgtaggggtaggcctcttcctactccccgctcggtagagcggcacacactaggtacactccatagctaactgttcctttttttttttttttttttttttttttttttttttttttttttcttttttttttttttccctctttcttcccttctcatcttattctactttctttcttggtggctccatcttagccctagtcacggctagctgtgaaaggtccgtgagccgcatgactgcagagagtgccgtaactggtctctctgcagatcatgt

SEQ ID NO: 301 - DNA, 9646 bp, Artificial Sequence
  Hepatitis C virus genotype 1
gccagccccctgatgggggcgacactccaccatgaatcactcccctgtgaggaactactgtcttcacgcagaaagcgtctagccatggcgttagtatgagtgtcgtgcagcctccaggaccccccctcccgggagagccatagtggtctgcggaaccggtgagtacaccggaattgccaggacgaccgggtcctttcttggataaacccgctcaatgcctggagatttgggcgtgcccccgcaagactgctagccgagtagtgttgggtcgcgaaaggccttgtggtactgcctgatagggtgcttgcgagtgccccgggaggtctcgtagaccgtgcaccatgagcacgaatcctaaacctcaaagaaaaaccaaacgtaacaccaaccgtcgcccacaggacgtcaagttcccgggtggcggtcagatcgttggtggagtttacttgttgccgcgcaggggccctagattgggtgtgcgcgcgacgaggaagacttccgagcggtcgcaacctcgaggtagacgtcagcctatccccaaggcacgtcggcccgagggcaggacctgggctcagcccgggtacccttggcccctctatggcaatgagggttgcgggtgggcgggatggctcctgtctccccgtggctctcggcctagctggggccccacagacccccggcgtaggtcgcgcaatttgggtaaggtcatcgatacccttacgtgcggcttcgccgacctcatggggtacataccgctcgtcggcgcccctcttggaggcgctgccagggccctggcgcatggcgtccgggttctggaagacggcgtgaactatgcaacagggaaccttcctggttgctctttctctatcttccttctggccctgctctcttgcctgactgtgcccgcttcagcctaccaagtgcgcaattcctcggggctttaccatgtcaccaatgattgccctaactcgagtattgtgtacgaggcggccgatgccatcctgcacactccggggtgtgtcccttgcgttcgcgagggtaacgcctcgaggtgttgggtggcggtgacccccacggtggccaccagggacggcaaactccccacaacgcagcttcgacgtcatatcgatctgcttgtcgggagcgccaccctctgctcggccctctacgtgggggacctgtgcgggtctgtctttcttgttggtcaactgtttaccttctctcccaggcgccactggacgacgcaagactgcaattgttctatctatcccggccatataacgggtcatcgcatggcatgggatatgatgatgaactggtcccctacggcagcgttggtggtagctcagctgctccggatcccacaagccatcatggacatgatcgctggtgctcactggggagtcctggcgggcatagcgtatttctccatggtggggaactgggcgaaggtcctggtagtgctgctgctatttgccggcgtcgacgcggaaacccacgtcaccgggggaagtgccggccgcaccacggctgggcttgttggtctccttacaccaggcgccaagcagaacatccaactgatcaacaccaacggcagttggcacatcaatagcacggccttgaactgcaatgaaagccttaacaccggctggttagcagggctcttctatcagcacaaattcaactcttcaggctgtcctgagaggttggccagctgccgacgccttaccgattttgcccagggctggggtcctatcagttatgccaacggaagcggcctcgacgaacgcccctactgctggcactaccctccaagaccttgtggcattgtgcccgcaaagagcgtgtgtggcccggtatattgcttcactcccagccccgtggtggtgggaacgaccgacaggtcgggcgcgcctacctacagctggggtgcaaatgatacggatgtcttcgtccttaacaacaccaggccaccgctgggcaattggttcggttgtacctggatgaactcaactggattcaccaaagtgtgcggagcgcccccttgtgtcatcggaggggtgggcaacaacaccttgctctgccccactgattgtttccgcaagcatccggaagccacatactctcggtgcggctccggtccctggattacacccaggtgcatggtcgactacccgtataggctttggcactatccttgtaccatcaattacaccatattcaaagtcaggatgtacgtgggaggggtcgagcacaggctggaagcggcctgcaactggacgcggggcgaacgctgtgatctggaagacagggacaggtccgagctcagcccattgctgctgtccaccacacagtggcaggtccttccgtgttctttcacgaccctgccagccttgtccaccggcctcatccacctccaccagaacattgtggacgtgcagtacttgtacggggtagggtcaagcatcgcgtcctgggccattaagtgggagtacgtcgttctcctgttcctcctgcttgcagacgcgcgcgtctgctcctgcttgtggatgatgttactcatatcccaagcggaggcggctttggagaacctcgtaatactcaatgcagcatccctggccgggacgcacggtcttgtgtccttcctcgtgttcttctgctttgcgtggtatctgaagggtaggtgggtgcccggagcggtctacgccttctacgggatgtggcctctcctcctgctcctgctggcgttgcctcagcgggcatacgcactggacacggaggtggccgcgtcgtgtggcggcgttgttcttgtcgggttaatggcgctgactctgtcgccatattacaagcgctacatcagctggtgcatgtggtggcttcagtattttctgaccagagtagaagcgcaactgcacgtgtgggttccccccctcaacgtccggggggggcgcgatgccgtcatcttactcatgtgtgttgtacacccgactctggtatttgacatcaccaaactactcctggccatcttcggacccctttggattcttcaagccagtttgcttaaagtcccctacttcgtgcgcgttcaaggccttctccggatctgcgcgctagcgcggaagatagccggaggtcattacgtgcaaatggccatcatcaagttaggggcgcttactggcacctatgtgtataaccatctcacccctcttcgagactgggcgcacaacggcctgcgagatctggccgtggctgtggaaccagtcgtcttctcccgaatggagaccaagctcatcacgtggggggcagataccgccgcgtgcggtgacatcatcaacggcttgcccgtctctgcccgtaggggccaggagatactgcttgggccagccgacggaatggtctccaaggggtggaggttgctggcgcccatcacggcgtacgcccagcagacgagaggcctcctagggtgtataatcaccagcctgactggccgggacaaaaaccaagtggagggtgaggtccagatcgtgtcaactgctacccaaaccttcctggcaacgtgcatcaatggggtatgctggactgtctaccacggggccggaacgaggaccatcgcatcacccaagggtcctgtcatccagatgtataccaatgtggaccaagaccttgtgggctggcccgctcctcaaggttcccgctcattgacaccctgcacctgcggctcctcggacctttacctggtcacgaggcacgccgatgtcattcccgtgcgccggcgaggtgatagcaggggtagcctgctttcgccccggcccatttcctacttgaaaggctcctcggggggtccgctgttgtgccccgcgggacacgccgtgggcctattcagggccgcggtgtgcacccgtggagtggctaaggcggtggactttatccctgtggagaacctagagacaaccatgagatccccggtgttcacggacaactcctctccaccagcagtgccccagagcttccaggtggcccacctgcatgctcccaccggcagcggtaagagcaccaaggtcccggctgcgtacgcagcccagggctacaaggtgttggtgctcaacccctctgttgctgcaacgctgggctttggtgcttacatgtccaaggcccatggggttgatcctaatatcaggaccggggtgagaacaattaccactggcagccccatcacgtactccacctacggcaagttccttgccgacggcgggtgctcaggaggtgcttatgacataataatttgtgacgagtgccactccacggatgccacatccatcttgggcatcggcactgtccttgaccaagcagagactgcgggggcgagactggttgtgctcgccactgctacccctccgggctccgtcactgtgtcccatcctaacatcgaggaggttgctctgtccaccaccggagagatccctttttacggcaaggctatccccctcgaggtgatcaaggggggaagacatctcatcttctgccactcaaagaagaagtgcgacgagctcgccgcgaagctggtcgcattgggcatcaatgccgtggcctactaccgcggtcttgacgtgtctgtcatcccgaccagcggcgatgttgtcgtcgtgtcgaccgatgctctcatgactggctttaccggcgacttcgactctgtgatagactgcaacacgtgtgtcactcagacagtcgatttcagccttgaccctacctttaccattgagacaaccacgctcccccaggatgctgtctccaggactcaacgccggggcaggactggcagggggaagccaggcatctacagatttgtggcaccgggggagcgcccctccggcatgttcgactcgtccgtcctctgtgagtgctatgacgcgggctgtgcttggtatgagctcacgcccgccgagactacagttaggctacgagcgtacatgaacaccccggggcttcccgtgtgccaggaccatcttgaattttgggagggcgtctttacgggcctcactcatatagatgcccactttctatcccagacaaagcagagtggggagaactttccttacctggtagcgtaccaagccaccgtgtgcgctagggctcaagcccctcccccatcgtgggaccagatgtggaagtgtttgatccgccttaaacccaccctccatgggccaacacccctgctatacagactgggcgctgttcagaatgaagtcaccctgacgcacccaatcaccaaatacatcatgacatgcatgtcggccgacctggaggtcgtcacgagcacctgggtgctcgttggcggcgtcctggctgctctggccgcgtattgcctgtcaacaggctgcgtggtcatagtgggcaggattgtcttgtccgggaagccggcaattatacctgacagggaggttctctaccaggagttcgatgagatggaagagtgctctcagcacttaccgtacatcgagcaagggatgatgctcgctgagcagttcaagcagaaggccctcggcctcctgcagaccgcgtcccgccaagcagaggttatcacccctgctgtccagaccaactggcagaaactcgaggtcttctgggcgaagcacatgtggaatttcatcagtgggatacaatacttggcgggcctgtcaacgctgcctggtaaccccgccattgcttcattgatggcttttacagctgccgtcaccagcccactaaccactggccaaaccctcctcttcaacatattgggggggtgggtggctgcccagctcgccgcccccggtgccgctaccgcctttgtgggcgctggcttagctggcgccgccatcggcagcgttggactggggaaggtcctcgtggacattcttgcagggtatggcgcgggcgtggcgggagctcttgtagcattcaagatcatgagcggtgaggtcccctccacggaggacctggtcaatctgctgcccgccatcctctcgcctggagcccttgtagtcggtgtggtctgcgcagcaatactgcgccggcacgttggcccgggcgagggggcagtgcaatggatgaaccggctaatagccttcgcctcccgggggaaccatgtttcccccacgcactacgtgccggagagcgatgcagccgcccgcgtcactgccatactcagcagcctcactgtaacccagctcctgaggcgactgcatcagtggataagctcggagtgtaccactccatgctccggttcctggctaagggacatctgggactggatatgcgaggtgctgagcgactttaagacctggctgaaagccaagctcatgccacaactgcctgggattccctttgtgtcctgccagcgcgggtataggggggtctggcgaggagacggcattatgcacactcgctgccactgtggagctgagatcactggacatgtcaaaaacgggacgatgaggatcgtcggtcctaggacctgcaggaacatgtggagtgggacgttccccattaacgcctacaccacgggcccctgtactccccttcctgcgccgaactataagttcgcgctgtggagggtgtctgcagaggaatacgtggagataaggcgggtgggggacttccactacgtatcgggtatgactactgacaatcttaaatgcccgtgccagatcccatcgcccgaatttttcacagaattggacggggtgcgcctacataggtttgcgcccccttgcaagcccttgctgcgggaggaggtatcattcagagtaggactccacgagtacccggtggggtcgcaattaccttgcgagcccgaaccggacgtagccgtgttgacgtccatgctcactgatccctcccatataacagcagaggcggccgggagaaggttggcgagagggtcacccccttctatggccagctcctcggccagccagctgtccgctccatctctcaaggcaacttgcaccgccaaccatgactcccctgacgccgagctcatagaggctaacctcctgtggaggcaggagatgggcggcaacatcaccagggttgagtcagagaacaaagtggtgattctggactccttcgatccgcttgtggcagaggaggatgagcgggaggtctccgtacccgcagaaattctgcggaagtctcggagattcgcccgggccctgcccgtttgggcgcggccggactacaaccccccgctagtagagacgtggaaaaagcctgactacgaaccacctgtggtccatggctgcccgctaccacctccacggtcccctcctgtgcctccgcctcggaaaaagcgtacggtggtcctcaccgaatcaaccctatctactgccttggccgagcttgccaccaaaagttttggcagctcctcaacttccggcattacgggcgacaatacgacaacatcctctgagcccgccccttctggctgcccccccgactccgacgttgagtcctattcttccatgccccccctggagggggagcctggggatccggatctcagcgacgggtcatggtcgacggtcagtagtggggccgacacggaagatgtcgtgtgctgctcaatgtcttattcctggacaggcgcactcgtcaccccgtgcgctgcggaagaacaaaaactgcccatcaacgcactgagcaactcgttgctacgccatcacaatctggtgtattccaccacttcacgcagtgcttgccaaaggcagaagaaagtcacatttgacagactgcaagttctggacagccattaccaggacgtgctcaaggaggtcaaagcagcggcgtcaaaagtgaaggctaacttgctatccgtagaggaagcttgcagcctgacgcccccacattcagccaaatccaagtttggctatggggcaaaagacgtccgttgccatgccagaaaggccgtagcccacatcaactccgtgtggaaagaccttctggaagacagtgtaacaccaatagacactaccatcatggccaagaacgaggttttctgcgttcagcctgagaaggggggtcgtaagccagctcgtctcatcgtgttccccgacctgggcgtgcgcgtgtgcgagaagatggccctgtacgacgtggttagcaagctccccctggccgtgatgggaagctcctacggattccaatactcaccaggacagcgggttgaattcctcgtgcaagcgtggaagtccaagaagaccccgatggggttctcgtatgatacccgctgttttgactccacagtcactgagagcgacatccgtacggaggaggcaatttaccaatgttgtgacctggacccccaagcccgcgtggccatcaagtccctcactgagaggctttatgttgggggccctcttaccaattcaaggggggaaaactgcggctaccgcaggtgccgcgcgagcggcgtactgacaactagctgtggtaacaccctcacttgctacatcaaggcccgggcagcctgtcgagccgcagggctccaggactgcaccatgctcgtgtgtggcgacgacttagtcgttatctgtgaaagtgcgggggtccaggaggacgcggcgagcctgagagccttcacggaggctatgaccaggtactccgccccccccggggaccccccacaaccagaatacgacttggagcttataacatcatgctcctccaacgtgtcagtcgcccacgacggcgctggaaagagggtctactaccttacccgtgaccctacaacccccctcgcgagagccgcgtgggagacagcaagacacactccagtcaattcctggctaggcaacataatcatgtttgcccccacactgtgggcgaggatgatactgatgacccatttctttagcgtcctcatagccagggatcagcttgaacaggctcttaactgtgagatctacggagcctgctactccatagaaccactggatctacctccaatcattcaaagactccatggcctcagcgcattttcactccacagttactctccaggtgaaatcaatagggtggccgcatgcctcagaaaacttggggtcccgcccttgcgagcttggagacaccgggcccggagcgtccgcgctaggcttctgtccagaggaggcagggctgccatatgtggcaagtacctcttcaactgggcagtaagaacaaagctcaaactcactccaatagcggccgctggccggctggacttgtccggttggttcacggctggctacagcgggggagacatttatcacagcgtgtctcatgcccggccccgctggttctggttttgcctactcctgctcgctgcaggggtaggcatctacctcctccccaaccgatgaaggttggggtaaacactccggcctcttaggccatttcctgtttttttttttttttttttttttttttttttttttttttttttttttttttctttttttttttttttttccttttttttttttttttttttctttccttcttttttcctttcttttccttccttctttaatggtggctccatcttagccctagtcacggctagctgtgaaaggtccgtgagccgcatgactgcagagagtgctgatactggcctctctgcagatcatgt

SEQ ID NO: 302 - DNA, 9443 bp, Artificial Sequence
  Hepatitis C virus genotype 7
gccagccccttacggggcgacactccgccatgaatcactcccctgcgaggaaccactgtcctcacgcagaaagcgtctagccatgacgttagtatgagtgtcgtacagcctccaggaccccccctcccgggagagccatagtggtctgcggaaccggtgagtacaccggaattgccgggaagactgggtcctttcttggatcaacccactctatgcccggagatttgggcgtgcccccgcgagactgctagccgagtagtgttgggtcgcgaaaggccttgtggtactgcctgatagggtgcttgcgagtgccccgggaggtctcgtagaccgtgcaccatgagcacgaatcctaaacctcaaagattaaccaaaagaaacaccgtccgtcgcccacagaacgttaagttcccgggtggcgggcagatcgttggcggagtctacttgttgccgcgcaggggccctagattgggtgtgcgcggcactaggaagagttcggagcgatcgcagcccaggggaagacgccaacgtatccccaaagctgcctcttcacagggtaaagcctggggcaagcccgggtacccttggcccctgtatggtaacgagggctgtggctgggcagggtggctcctgtccccccgcggctctcgacctacttggggccccacygacccccggcaccgctcgcgaaacctcggtaaggtgatcgacaccatgacctgcgggtttgccgacctcatggggtacatccctgtcctaggcgcccccctagggggcgttgccagggctctggcacatggtgttagagttctggaggacggggtcaactatgcaacagggaacttgcctggttgctccttttctatcttcytactagccctcctgtcatgtctaacagtcccggcatcggcttatgaagtccgcaactccagtggrgtctatcatctcaccaatgactgccccaacgctagtatagtctatgaaacagacaacgccatcctacacgagcctgggtgcgtgccttgcgttcgcgagggtaatactagcaggtgttgggaaccagtggcccccactttggcggtccgctatcgcggagcgcttactgacgatttgcggacgcatattgacctagtggtggcgtcagctaccctgtgctccgccttgtacgtgggggacatttgtggagccatcttcattgccagccaagctgttctctggaagcccggggggggtcggatagtgcaagattgcaattgttcgatctacccgggccacgtcaccggccacaggatggcgtgggacatgatgcagaactgggcgccggccttgtcaatggttgccgcttacgctgtgagagtgcccggtgtcatcattaccactgtagcgggcggccactggggtgtgttatttggcctcgcttactttggtatggcgggaaactgggcaaaggtaatactcatcatgctactcatgtccggcgtcgacgcggaaaccatggccgtcggggctagggccgctcacaccactggcgcccttgtcagcctgctcaatccagggcccagtcagcgcctgcagctgatcaacaccaatgggtcatggcacatcaaccggaccgctttgaactgcaatgactctttgcagacagggttcatagcggccctcttctacacacataggttcaattctagtggctgtcccgagaggatggcttcttgtaaacctctcagtgactttgaccaggggtggggcccgctgtggtacaattcaacagaaagaccttcggaccagcgaccctattgctggcactacgcgccatcgccgtgtggtattgtgccggctaaggatgtttgcggtccggtctactgctttacaccaagcccggttgtggtgggcaccacggatcgccggggggtgcccacgtatacttggggtgaaaatgagtctgatgtcttcytgctcaacagcacaaggccgccgcaaggcagttggtttgggtgctcatggatgaacacaacggggttcacgaagacctgcggaggtcctccgtgcaagatacgtccccagggtgcccagagtaacacctctctcacttgtcccacagactgcttcaggaaacatccgcgtgccacatactccgcttgcggatctggtccgtggttgacacctagatgcatggtccattacccctatagactgtggcactacccgtgtacagtcaacttcaccatacacaaagtcaggttatacatagggggtgtagaacataggctcgatgcagcgtgcaattggacgcggggtgagcgatgcgacctggaggaccgagacagggtggacatgtcccccctgctccattccactacggagctcgcaatacttccgtgttcctttgtgccgcttccggccttatctacgggactgatccacctgcaccaaaacatcgttgacgcccagtacctttatggtctttctcccgctataataagctgggccatcagatgggagtgggtagtcctcgttttcctactcctggcggacgcgcggatctgcgcctgcctttggatgatgatgcttatggcccaggctgaagccgctctggagaacttgatccacctcaacgcggccagccttgcgggaacccatggtatctggtggctccttttagtcttttgtgcctcttggcatctacgaggcagggttgtccctctggtgacgtatgggatatgcgggatgtggcccttcttcctcatgttgctgagcctccccccacgagcgtatgctctggacagggaagtgagcgcagcgttgggaacgggcatgctcgccatcatcctattagttaccttgggaccgcactacaagagacttctagcccttattctctggtgggtcacatatttccttacaaggtgtgaagcagcactccaaacgtgggtccctcctctcaaccctcgggggggcagggacggtttcatcctgtgtgtgctgctgtgctatccaggccttgtctttgacatcacaaaatggttgctggtcatgatgtgccctctctacctcctccagttgtgtttggtgaggactccatactttgtgagggcccaggccctcatcagagtgtgttctctcttcaaaacgctagctgggggacggtacgtgcaggccgcgctgctcactattggccgctggaccggcacttatatttataaccatctcgcccccctggaaacatgggccgccggcggcctacgggatttggccgttgcagtcgagcccgtgatattctcccccatggagaagaagatcatagtttggggggcggagaccactgcttgtggcgacattctttgtggcctgcctgtctcagctcggctcggcagggaagtcctgctagggcccgcggatgactacaggtccatgggatggcaactcctggctccaatctcagcatacgcacagcagacccgcggtctcatctctacccttgtcgtgagcctcactggccgtgataagaacgagactgccggcgaggtgcaggtgttgtccacctcaacgcagaccttcctggggaccaatgtgggcggtgtcatgtggggaccttatcacggagcgggcacgcggactgtggccggccggggtgggcctgtcctccagatgtacacgtcagtcagtgacgatctggtgggctggcctgccccgcctggctccaagtccctcgagccctgctcgtgcgggtcagcagacctttacttggtgacgcgcaatgctgacgtccttcctcttaggaggaagggtgacggtacagcgtccctactgtccccgcgccctgtgtcctcccttaaaggctcctcgggagggcctgtcttgtgcccccaaagtcattgcgttggcatcttcagagctgctgtctgcacccgcggtgtagccaaagcagttcagtttgttcccatcgagaagatgcaggtggcccagaggtcgccatcattcagtgacaatagcacccctccagcggtgcccagcacctatcaagtaggctatttacatgcccccactggcagcggcaagagcactaaggtccctgcggcgtatgccagccagggctacaaagtgctcgtgcttaatccatcagtcgcggccacccttgggtttggtgcctacatgtccaaggcttatggaattgatccaagtgtgcgcaccggcgcgcgcacggtgaccacgggggctcccataacttactcaacctatgggaagttccttgccgacgggggttgttcaggtggtgcctatgatataatcatatgtgatgaatgccatgccatcgatgctaccaccgtggtcggcataggcaccgtgttggaccaggcagagactagtggtgtccgacttgtggtgctagctacggccaccccccccggaagcgttacggtgccccaccccaacatcgaggaggtcgcccttggcaacgatggggaaattcccttctatgggaaagccatccccctgcaacacatcaaggggggaaggcatctcattttctgtcattccaaaaagaaatgtgatgagcttgccgggaagctcacctcattggggctgactgccgttgcttactatagggggttggatgtttcggtgatcccaacgtctggcgatgtagtcgtggtggctactgatgccttgatgacgggctttaccggagacttcgactccgtcatagactgcaacgtggcggttacccagactgtagacttctccttggaccccaccttcactattgagaccaccacagtcccgcaagattctgtctcgcgctctcagagacgtgggaggacaggtaggggcaggcttggcatctacagatacgtgtccagtggcgagcggccatccggtatgttcgacaccagcgtgctctgtgagtgctatgacctggggtgctcgtggtatgaactaacgcccagtgaaaccaccacgcgcctcagagcctacctcaattgccctggtcttccagtgtgccaagaccatctggagttctgggagggcgtctttacgggacttactcatattgatgcacacttcctgtcccagaccaaacaagagggccaaaattatgcgtacctgactgcataccaagctacagtgtgcgcccgggcgaaagcccccccgccctcctgggacgtccagtggaagtgtctccaaagactaaagccactgttagtagggcccacgcccttgctatacaggctaggcagtgttaccaatgaagtcacattcactcatcccatcaccaaatacattgccacgtgcatggctgccgacttggaggtcactacgagcacctgggtgatcgtaggtggcgtcctcgccgccgtggccgcatattgcatgtctactggcagtgttgttgtggttggccgtgtggtccttggatccaacgtggtgacggcccccgacagagaggttttataccagcactttgatgagatggaagagtgctccaaagctcctgaattgctgaaacacgcccaaaccatcggcggaatgttcaaggacaaggccctcgccgtcttggatacgctcaagccggccgcccaggctgctgttcccattgtggagaccaacttccaaaaggtggagaagctgtggaatcagcatatgtggaacttcataagcggcattcaatacctagctgggctatccacactgccaggtaatccaactgtggcctcactgatggccttcaccgcctcagttactagcccccttgctacatcgaccacactactagtcaacatcctgggtgggtggttcgcaagccagttagcgccgccgtctgctgccacgactttcgtggtctcgggcctcgcaggggcggcagtgggtagtgttggcttgggcaaggtcttagttgatgtcctggccggctatggcgccggcatagctggcgccctggtggccttcaaaatcatgtctggagaggtccctagcacagaggatctggcaaacctcttacctgccatactctcacctggagctttagttgtgggagttgtttgtgccgcgatcatcaaacggcataccggcactagtgagggagtcacgcagtggatgaaccgtctcattgcgttcgcctcccgtggaaatcacgtgtcgccgacccactacatacaggatgatgatgcgtcaaaacgcgtcatggggatactcagctcccttaccatcaccagcctcataaaacgagtactggcctgggcgcagactgaytattctgcgccctgtgccgggagctggctccgggaggtgtgggactgggtttgcatggtcctatccgactttgcatcttggttgaaggccaaggtacttcccagccttccagggatcccattcctatcctgtcagaaagggtataaaggtgagtggcggaacgatggcatcatgaacaccaagtgcccgtgtggggccctgatagcagggcacgtcaagaacggatcgatgcgcatcgtgggccccaagacctgccgaaacacctggtggggaaccttccctattaattcccataccacgggaccaagttctcctgtaccctcccaytgttatcaaagggccttgtggagggtatctgcracggagtacgtcgagatccttcgtcacaatgaccagcattaygtggtgggagtgacggcggaggacctcaagtgcccgtgtcaggttccttcccccgaattcttcagctttgtggacggggtgcggatacacagattcgcccctgaacccaagcccatgatccgggaagaagccgctttcgtggtgggtctgcactcatatgtggtggggtctcagctcccttgtgaaccggagccggacgtccaaactgtctcgcagctcctaaccgacccctcacacatcaccgcagaaaccgcggctagaaggctcaggagaggttcccccccatccaacgccagttcttctgctagtcaactctcagctccatctctaaaagccacccacacaactctgccacaacatcctgacgcagaactgatagaggccaacctcatgtgggaacataaggttggtgccatcagaaggatggagacagacaccaaagtcatcatacttgactcctttgattcagcttcttccgtygaggatgacatggaaccgtccaccgccgcggagtgtctgcgtacgcgtaaggtcttcccaccggccatgcccatatgggcgaggccagactacaatcctcctgttgtggagaattggaaggaccccgagtacgcacctccccaggtgtctgggtgcgctctaccacctgcgcagacccctcctgttccaccacccaggcggaagcgggcggttatccaactcacagagtccgcggtttccacggcactggcggaactcgctgagaggtccttcccaaaggaggaggcaccccccagcgactccgccattagtctggattcaccggcggcaaatgaccctccatctgattgtgaccaaggcagtgagatctctttctcatccatgccacccctagagggggagccgggtgatccagacttgtctgatggctcttggtcaacagtcagcaccagatctgacgtgatttgctgttccatgtcctactcatggacgggagccttagtgacgccctccggtccggaggaggaaaggctcccaataaatgccctyagtaacaccatgcttcggcattataacatggtttacagcacaacatcacgctcagcttcacaaagagcaaaaaaagtgacttttgacagattgcaagtcctagacgaccactacaaaagggcgctcgccgacgtgaaagcggatgcttccacggttaaggcgcagttgctctcagtagaggaagctgctgccctcacccctgcccactcagccagatctaagtttgggtacggggcaaaggaagtcagatctcttgcgcccaaggcaatgtctcacatcaaagaggtctggaaggacttgctacaggacatgaccaccccgataccgaccaccataatggccaagaatgaagtcttctgcgtaaatcctgccaagggcgggaaaaagccagctagactgattgtttaccctgacctaggtgtgagggtatgcgagaagcgggctttgtacgacatagctcaaaagcttccgaaggccataatggggcaggcgtacgggttccaatattcaccatcgcagcgggtcgartacytagttaagacgtggaagtccaaacggactcccatgggcttctcatatgacacccgctgctttgattccactgtcacagaacaagacatccgcactgagagcgagatctatcagtgctgcaacctcgaccccgaggctcgcaccatcattaacgcccttaccgagaggttgtacgtggggggacccatgttcaactctaaaggtcagagggtcggttatcgaaggtgcagagccagcggagttttccccaccagcatgggaaacactatgacgtgctacatcaaagccaaagcggctgcagcagctgcagggctagagagcactgatttcctggtctgcggcgatgacttggtggtcatttgcgagagcaagggagtcgaacgggatagggcggacctgcaagcctttgcagcggcaatgaccaggtactccgctccacccggggacatgccccagcccgcttatgaccttgagcacattgactcttgctcatccaatgtctcagtcgcccgggacaactcggggaaaagagtctactacctcactagagaccctaccaacccactatccagggcagcttgggagaccgcccgtcactcacctgtaaactcctgggtgggcaacataatcatgtttgcccccaccatatgggtgaggatggttctcatgactcactttttcgctctcctcctcaatgaggagcgattgaacgatccagtgagttttgagatgtatggtgcaacctacacggtctgcccaacagacttaccagacattatacaaagactccatgggctccgcgcatttgaactccatacttactctccagcagaactgacgcgggtggcagctaccctcaggaagcttggggtgccacccctcaggacctggagacaacgggctcgcaaggtccgcgcggggctgataggccaggggggcagggctcgcatatgcggtctctacctcttcaactgggctgtcaggaccaagatcaaactcactccacttgcaggcgctggccggctcgatctttcgagctggttcagcgtttgcgccggcgaggcggacgtggatcacagcacgcccagagcccatcctcgcccattactcctgtgcctactcctacttgccgtaggggtaggcattttcctcctacccgctcggtaagcgggtaacactccaggcttttaagccataaattctgttttttttttttttttttttttttt
